(19) United States
(12) Patent Application Publication
(10) Pub. No.: US 2024/0043489 A1
(43) Pub. Date: Feb. 8, 2024

(54) Cytokine Prodrugs Comprising a Cleavable Linker

(71) Applicant: Trutino Biosciences Inc., San Diego, CA (US)

(72) Inventors: Phillip S. Kim, San Diego, CA (US); Emma Langley, San Diego, CA (US); Hsieng Lu, Thousand Oaks, CA (US); Xinjun Liu, San Diego, CA (US)

(73) Assignee: Trutino Biosciences Inc., San Diego, CA (US)

(21) Appl. No.: 17/792,976

(22) PCT Filed: Jan. 14, 2021
(86) PCT No.: PCT/US2021/013478

§ 371 Date: Jan. 11, 2023

Related U.S. Application Data
(60) Provisional application No. 62/961,537, filed on Jan. 15, 2020.

(51) Int. Cl. C07K 14/55; A61K 47/65; A61K 47/68; C07K 14/715; A61P 35/00; A61K 47/60

(52) U.S. Cl. CPC C07K 14/55; A61K 47/65; A61K 47/6813; C07K 14/7155; A61P 35/00; A61K 47/60

(57) ABSTRACT

This disclosure relates to protease-cleavable cytokine prodrugs. In some embodiments, the prodrugs comprise a targeting sequence. In some embodiments, the prodrugs comprise a pharmacokinetic modulator.

### CROSS-REFERENCE TO RELATED APPLICATIONS

[0001] This application claims the benefit of priority of U.S. Provisional Patent Application No. 62/961,537, filed Jan. 15, 2020, which is incorporated herein by reference in its entirety for all purposes.

### INTRODUCTION AND SUMMARY

[0002] This disclosure relates to the field of cytokine therapeutics, particularly cytokine prodrugs comprising a cleavable linker.

[0003] Cytokines, such as IL-2, are powerful immune growth factors that play a significant role in sustaining an effective immune cell response. IL-2 has been reported to induce complete and durable regressions in cancer patients but immune related adverse effects have reduced its therapeutic potential. In some cases, however, systemic IL-2 administration can activate immune cells throughout the body. Systemic activation can lead to systemic toxicity and indiscriminate activation of immune cells, including immune cells that respond to a variety of epitopes, antigens, and stimuli. The therapeutic potential of IL-2 therapy can be impacted by these severe toxicities.

[0004] IL-2 therapies can also suffer from a short serum half-life, sometimes on the order of several minutes. Thus, the high doses of IL-2 that can be necessary to achieve an optimal immune-modulatory effect can contribute to severe toxicities.

[0005] As a result, cytokine therapeutics that overcome the hurdles of systemic or untargeted function, severe toxicity, and poor pharmacokinetics, are needed. The present disclosure aims to meet one or more of these needs, provide other benefits, or at least provide the public with a useful choice.

[0006] In some aspects, protease-activated pro-cytokines (also referred to as cytokine prodrugs) are provided, which can be administered to a subject in an inactive form. The inactive form can include a cytokine polypeptide sequence, a protease-cleavable polypeptide sequence, and an inhibitory polypeptide sequence capable of blocking an activity of the cytokine polypeptide sequence. Such prodrugs can become activated when the protease-cleavable polypeptide sequence is cleaved by a protease. Cleaving the protease-cleavable polypeptide can allow the inhibitory polypeptide sequence to dissociate from the cytokine polypeptide sequence.

[0007] Many tumors and tumor microenvironments exhibit aberrant expression of proteases. The present disclosure provides cytokine prodrugs that are activatable through proteolytic cleavage, such that they become active when they come in contact with proteases in a tumor or tumor microenvironment. In some cases, this can lead to an increase in active cytokines in and around the tumor or tumor microenvironment relative to the rest of a subject's body or healthy tissue. One exemplary advantage that can result is the formation of cytokine gradients. Such a gradient can form when a cytokine prodrug is administered and selectively or preferentially becomes activated in the tumor or tumor microenvironment and subsequently diffuses out of these areas to the rest of the body. These gradients can increase the trafficking of immune cells to the tumor and tumor microenvironment. Immune cells that traffic to the tumor can infiltrate the tumor. Infiltrating immune cells can mount an immune response against the cancer. Infiltrating immune cells can also secrete their own chemokines and cytokines. The cytokines can have either or both of autocrine and paracrine effects within the tumor and tumor microenvironment. In some cases, the immune cells include T cells, such as T effector cells or cytotoxic T cells, or NK cells.

[0008] Also described herein are methods of treatment and methods of administrating the cytokine prodrugs described herein. Such administration can be systemic or local. In some embodiments, a cytokine prodrug described herein is administered systemically or locally to treat a cancer.

[0009] A further example of local administration is administration of a cytokine prodrug, such as an IL-2 cytokine prodrug, to boost T regulatory cells. In some cases, the local administration of an IL-2 cytokine prodrug is to an area of inflammation. Such a method can be used to treat chronic autoimmune and/or inflammatory diseases.

[0010] The following embodiments are encompassed.

[0011] Embodiment 1 is a protease-activated pro-cytokine comprising:
[0012] a cytokine polypeptide sequence;
[0013] a inhibitory polypeptide sequence capable of blocking an activity of the cytokine polypeptide sequence;
[0014] a linker between the cytokine polypeptide sequence and the inhibitory polypeptide sequence,
[0015] the linker comprising a protease-cleavable polypeptide sequence; and
[0016] a targeting sequence, wherein the targeting sequence is configured to bind an extracellular matrix component, an integrin, or a syndecan; or is configured to bind, in a pH-sensitive manner, an extracellular matrix component, IgB (CD79b), an integrin, a cadherin, a heparan sulfate proteoglycan, a syndecan, or a fibronectin; or the targeting sequence comprises the sequence of any one of SEQ ID NOs: 180-662 or a variant having one or two mismatches relative to the sequence of any one of SEQ ID NOs: 180-662.

[0017] Embodiment 2 is the protease-activated pro-cytokine of the immediately preceding embodiment, further comprising a pharmacokinetic modulator.

[0018] Embodiment 3 is the protease-activated pro-cytokine of the immediately preceding embodiment, wherein the pharmacokinetic modulator comprises an immunoglobulin constant domain.

[0019] Embodiment 4 is the protease-activated pro-cytokine of embodiment 2, wherein the pharmacokinetic modulator comprises an immunoglobulin Fc region.

[0020] Embodiment 5 is the protease-activated pro-cytokine of the immediately preceding embodiment, wherein the immunoglobulin is a human immunoglobulin.

[0021] Embodiment 6 is the protease-activated pro-cytokine of any one of embodiments 4-5, wherein the immunoglobulin is IgG.

[0022] Embodiment 7 is the protease-activated pro-cytokine of the immediately preceding embodiment, wherein the IgG is IgG1, IgG2, IgG3, or IgG4.

[0023] Embodiment 8 is the protease-activated pro-cytokine of embodiment 2, wherein the pharmacokinetic modulator comprises an albumin.

[0024] Embodiment 9 is the protease-activated pro-cytokine of the immediately preceding embodiment, wherein the albumin is a serum albumin.

[0025] Embodiment 10 is the protease-activated pro-cytokine of any one of embodiments 8-9, wherein the albumin is a human albumin.

[0026] Embodiment 11 is the protease-activated pro-cytokine of embodiment 2, wherein the pharmacokinetic modulator comprises PEG.

[0027] Embodiment 12 is the protease-activated pro-cytokine of embodiment 2, wherein the pharmacokinetic modulator comprises XTEN.

[0028] Embodiment 13 is the protease-activated pro-cytokine of embodiment 2, wherein the pharmacokinetic modulator comprises CTP.

[0029] Embodiment 14 is the protease-activated pro-cytokine of any one of embodiments 2-13, wherein the protease-cleavable polypeptide sequence is between the cytokine polypeptide sequence and the pharmacokinetic modulator.

[0030] Embodiment 15 is the protease-activated pro-cytokine of any one of embodiments 2-13, wherein the pharmacokinetic modulator is between the cytokine polypeptide sequence and the protease-cleavable polypeptide sequence.

[0031] Embodiment 16 is the protease-activated pro-cytokine of any one of the preceding embodiments, comprising a plurality of protease-cleavable polypeptide sequences.

[0032] Embodiment 17 is the protease-activated pro-cytokine of the immediately preceding embodiment, wherein the cytokine polypeptide sequence is flanked by protease cleavable polypeptide sequences.

[0033] Embodiment 18 is the protease-activated pro-cytokine of the immediately preceding embodiment, having the structure PM-CL-CY-CL-IN (from N- to C-terminus or from C- to N-terminus), where PM is the pharmacokinetic modulator, each CL independently is a protease-cleavable polypeptide sequence, CY is the cytokine polypeptide sequence, and IN is the inhibitory polypeptide sequence.

[0034] Embodiment 19 is the protease-activated pro-cytokine of any one of the preceding embodiments, comprising the targeting sequence, wherein the targeting sequence is between the cytokine polypeptide sequence and the protease-cleavable polypeptide sequence or one of the protease-cleavable polypeptide sequences.

[0035] Embodiment 20 is the protease-activated pro-cytokine of any one of the preceding embodiments, wherein the cytokine polypeptide sequence comprises a modification to prevent disulfide bond formation, and optionally otherwise comprises wild-type sequence.

[0036] Embodiment 21 is the protease-activated pro-cytokine of any one of the preceding embodiments, wherein the cytokine polypeptide sequence has at least 80, 85, 90, 95, 97, 98, or 99 percent identity to the sequence of a wild-type cytokine polypeptide sequence or to a cytokine polypeptide sequence in Table 1.

[0037] Embodiment 22 is the protease-activated pro-cytokine of the immediately preceding embodiment, wherein the cytokine polypeptide sequence is a wild-type cytokine polypeptide sequence.

[0038] Embodiment 23 is the protease-activated pro-cytokine of any one of the preceding embodiments, wherein the cytokine polypeptide sequence is a monomeric cytokine, or wherein the cytokine polypeptide sequence is a dimeric cytokine polypeptide sequence comprising monomers that are associated covalently (optionally via a polypeptide linker) or noncovalently.

[0039] Embodiment 24 is the protease-activated pro-cytokine of any one of the preceding embodiments, wherein the inhibitory polypeptide sequence comprises a cytokine-binding domain.

[0040] Embodiment 25 is the protease-activated pro-cytokine of the immediately preceding embodiment, wherein the cytokine-binding domain is a cytokine-binding domain of a cytokine receptor or a cytokine-binding domain of a fibronectin.

[0041] Embodiment 26 is the protease-activated pro-cytokine of embodiment 24, wherein the cytokine-binding domain is an immunoglobulin cytokine-binding domain.

[0042] Embodiment 27 is the protease-activated pro-cytokine of the immediately preceding embodiment, wherein the immunoglobulin cytokine-binding domain comprises a light chain variable domain and a heavy chain variable domain that bind the cytokine.

[0043] Embodiment 28 is the protease-activated pro-cytokine of any one of embodiments 26-27, wherein the immunoglobulin cytokine-binding domain is an scFv, Fab, or VHH.

[0044] Embodiment 29 is the protease-activated pro-cytokine of any one of the preceding embodiments, wherein the protease-cleavable polypeptide sequence is recognized by a metalloprotease, a serine protease, a cysteine protease, an aspartate protease, a threonine protease, a glutamate protease, a gelatinase, an asparagine peptide lyase, a cathepsin, a kallikrein, a plasmin, a collagenase, a hK1, a hK10, a hK15, a stromelysin, a Factor Xa, a chymotrypsin-like protease, a trypsin-like protease, a elastase-like protease, a subtilisin-like protease, an actinidain, a bromelain, a calpain, a caspase, a Mir 1-CP, a papain, a HIV-1 protease, a HSV protease, a CMV protease, a chymosin, a renin, a pepsin, a matriptase, a legumain, a plasmepsin, a nepenthesin, a metalloexopeptidase, a metalloendopeptidase, an ADAM 10, an ADAM17, an ADAM 12, an urokinase plasminogen activator (uPA), an enterokinase, a prostate-specific target (PSA, hK3), an interleukin-1b converting enzyme, a thrombin, a FAP (FAP-a), a dipeptidyl peptidase, or dipeptidyl peptidase IV (DPPIV/CD26), a type II transmembrane serine protease (TTSP), a neutrophil elastase, a proteinase 3, a mast cell chymase, a mast cell tryptase, or a dipeptidyl peptidase.

[0045] Embodiment 30 is the protease-activated pro-cytokine of any one of the preceding embodiments, wherein the protease-cleavable polypeptide sequence comprises the sequence of any one of SEQ ID NOs: 700-741, or a variant having one or two mismatches relative to the sequence of any one of SEQ ID NOs: 700-741.

[0046] Embodiment 31 is the protease-activated pro-cytokine of any one of the preceding embodiments, wherein the protease-cleavable polypeptide sequence is recognized by a matrix metalloprotease.

[0047] Embodiment 32 is the protease-activated pro-cytokine of any one of the preceding embodiments, wherein the protease-cleavable polypeptide sequence is recognized by MMP-1.

[0048] Embodiment 33 is the protease-activated pro-cytokine of any one of the preceding embodiments, wherein the protease-cleavable polypeptide sequence is recognized by MMP-2.

[0049] Embodiment 34 is the protease-activated pro-cytokine of any one of the preceding embodiments, wherein the protease-cleavable polypeptide sequence is recognized by MMP-3.

[0050] Embodiment 35 is the protease-activated pro-cytokine of any one of the preceding embodiments, wherein the protease-cleavable polypeptide sequence is recognized by MMP-7.

[0051] Embodiment 36 is the protease-activated pro-cytokine of any one of the preceding embodiments, wherein the protease-cleavable polypeptide sequence is recognized by MMP-8.

[0052] Embodiment 37 is the protease-activated pro-cytokine of any one of the preceding embodiments, wherein the protease-cleavable polypeptide sequence is recognized by MMP-9.

[0053] Embodiment 38 is the protease-activated pro-cytokine of any one of the preceding embodiments, wherein the protease-cleavable polypeptide sequence is recognized by MMP-12.

[0054] Embodiment 39 is the protease-activated pro-cytokine of any one of the preceding embodiments, wherein the protease-cleavable polypeptide sequence is recognized by MMP-13.

[0055] Embodiment 40 is the protease-activated pro-cytokine of any one of the preceding embodiments, wherein the protease-cleavable polypeptide sequence is recognized by MMP-14.

[0056] Embodiment 41 is the protease-activated pro-cytokine of any one of the preceding embodiments, wherein the protease-cleavable polypeptide sequence is recognized by more than one MMP.

[0057] Embodiment 42 is the protease-activated pro-cytokine of any one of the preceding embodiments, wherein the protease-cleavable polypeptide sequence is recognized by two, three, four, five, six, or seven of MMP-2, MMP-7, MMP-8, MMP-9, MMP-12, MMP-13, and MMP-14.

[0058] Embodiment 43 is the protease-activated pro-cytokine of any one of the preceding embodiments, wherein the protease-cleavable polypeptide sequence comprises the sequence of any one of SEQ ID NOs: 80-94 or a variant sequence having one or two mismatches relative to the sequence of any one of SEQ ID NOs: 80-90.

[0059] Embodiment 44 is the protease-activated pro-cytokine of the immediately preceding embodiment, wherein the protease-cleavable polypeptide sequence comprises the sequence of SEQ ID NO: 80 or a variant sequence having one or two mismatches relative thereto.

[0060] Embodiment 45 is the protease-activated pro-cytokine of any one of embodiments 1-43, wherein the protease-cleavable polypeptide sequence comprises the sequence of SEQ ID NO: 81 or a variant sequence having one or two mismatches relative thereto.

[0061] Embodiment 46 is the protease-activated pro-cytokine of any one of embodiments 1-43, wherein the protease-cleavable polypeptide sequence comprises the sequence of SEQ ID NO: 82 or a variant sequence having one or two mismatches relative thereto.

[0062] Embodiment 47 is the protease-activated pro-cytokine of any one of embodiments 1-43, wherein the protease-cleavable polypeptide sequence comprises the sequence of SEQ ID NO: 83 or a variant sequence having one or two mismatches relative thereto.

[0063] Embodiment 48 is the protease-activated pro-cytokine of any one of embodiments 1-43, wherein the protease-cleavable polypeptide sequence comprises the sequence of SEQ ID NO: 84 or a variant sequence having one or two mismatches relative thereto.

[0064] Embodiment 49 is the protease-activated pro-cytokine of any one of embodiments 1-43, wherein the protease-cleavable polypeptide sequence comprises the sequence of SEQ ID NO: 85 or a variant sequence having one or two mismatches relative thereto.

[0065] Embodiment 50 is the protease-activated pro-cytokine of any one of embodiments 1-43, wherein the protease-cleavable polypeptide sequence comprises the sequence of SEQ ID NO: 86 or a variant sequence having one or two mismatches relative thereto.

[0066] Embodiment 51 is the protease-activated pro-cytokine of any one of embodiments 1-43, wherein the protease-cleavable polypeptide sequence comprises the sequence of SEQ ID NO: 87 or a variant sequence having one or two mismatches relative thereto.

[0067] Embodiment 52 is the protease-activated pro-cytokine of any one of embodiments 1-43, wherein the protease-cleavable polypeptide sequence comprises the sequence of SEQ ID NO: 88 or a variant sequence having one or two mismatches relative thereto.

[0068] Embodiment 53 is the protease-activated pro-cytokine of any one of embodiments 1-43, wherein the protease-cleavable polypeptide sequence comprises the sequence of SEQ ID NO: 89 or a variant sequence having one or two mismatches relative thereto.

[0069] Embodiment 54 is the protease-activated pro-cytokine of any one of embodiments 1-43, wherein the protease-cleavable polypeptide sequence comprises the sequence of SEQ ID NO: 90 or a variant sequence having one or two mismatches relative thereto.

[0070] Embodiment 55 is the protease-activated pro-cytokine of any one of embodiments 1-43, wherein the protease-cleavable polypeptide sequence comprises the sequence of SEQ ID NO: 80-89 or 90.

[0071] Embodiment 56 is the protease-activated pro-cytokine of any one of embodiments 1-43, wherein the protease-cleavable polypeptide sequence comprises the sequence of SEQ ID NO: 91.

[0072] Embodiment 57 is the protease-activated pro-cytokine of any one of embodiments 1-43, wherein the protease-cleavable polypeptide sequence comprises the sequence of SEQ ID NO: 92.

[0073] Embodiment 58 is the protease-activated pro-cytokine of any one of embodiments 1-43, wherein the protease-cleavable polypeptide sequence comprises the sequence of SEQ ID NO: 93.

[0074] Embodiment 59 is the protease-activated pro-cytokine of any one of embodiments 1-43, wherein the protease-cleavable polypeptide sequence comprises the sequence of SEQ ID NO: 94.

[0075] Embodiment 60 is the protease-activated pro-cytokine of any one of the preceding embodiments, wherein the targeting sequence comprises the sequence of any one of SEQ ID NOs: 180-662, or a variant having one or two mismatches relative to the sequence of any one of SEQ ID NOs: 180-662.

[0076] Embodiment 61 is the protease-activated pro-cytokine of the immediately preceding embodiment, wherein the targeting sequence comprises the sequence of any one of SEQ ID NOs: 180-662.

[0077] Embodiment 62 is the protease-activated pro-cytokine of any one of the preceding embodiments, wherein the targeting sequence binds to denatured collagen.

[0078] Embodiment 63 is the protease-activated pro-cytokine of any one of embodiments 1-61, wherein the targeting sequence binds to collagen.

[0079] Embodiment 64 is the protease-activated pro-cytokine of any one of embodiments 62-63, wherein the collagen is collagen I.

[0080] Embodiment 65 is the protease-activated pro-cytokine of any one of embodiments 62-63, wherein the collagen is collagen II.

[0081] Embodiment 66 is the protease-activated pro-cytokine of any one of embodiments 62-63, wherein the collagen is collagen III.

[0082] Embodiment 67 is the protease-activated pro-cytokine of any one of embodiments 62-63, wherein the collagen is collagen IV.

[0083] Embodiment 68 is the protease-activated pro-cytokine of any one of embodiments 1-61, wherein the targeting sequence binds to integrin.

[0084] Embodiment 69 is the protease-activated pro-cytokine of the immediately preceding embodiment, wherein the integrin is one or more of α1β1 integrin, α2β1 integrin, α3β1 integrin, α4β1 integrin, α5β1 integrin, α6β1 integrin, α7β1 integrin, α9β1 integrin, α4β7 integrin, αvβ3 integrin, αvβ5 integrin, αIIbβ3 integrin, αIIIbβ3 integrin, αMβ2 integrin, or αIIbβ3 integrin.

[0085] Embodiment 70 is the protease-activated pro-cytokine of any one of embodiments 1-61, wherein the targeting sequence binds to von Willebrand factor.

[0086] Embodiment 71 is the protease-activated pro-cytokine of any one of embodiments 1-61, wherein the targeting sequence binds to IgB.

[0087] Embodiment 72 is the protease-activated pro-cytokine of any one of embodiments 1-61, wherein the targeting sequence binds to heparin.

[0088] Embodiment 73 is the protease-activated pro-cytokine of the immediately preceding embodiment, wherein the targeting sequence binds to heparin and a syndecan, a heparan sulfate proteoglycan, or an integrin, optionally wherein the integrin is one or more of α1β1 integrin, α2β1 integrin, α3β1 integrin, α4β1 integrin, α5β1 integrin, α6β1 integrin, α7β1 integrin, α9β1 integrin, α4β7 integrin, αvβ3 integrin, αvβ5 integrin, αIIbβ3 integrin, αIIIbβ3 integrin, αMβ2 integrin, or αIIbβ3 integrin.

[0089] Embodiment 74 is the protease-activated pro-cytokine of any one of embodiments 72-73, wherein the syndecan is one of more of syndecan-1, syndecan-4, and syndecan-2(w).

[0090] Embodiment 75 is the protease-activated pro-cytokine of any one of embodiments 1-61, wherein the targeting sequence binds to a heparan sulfate proteoglycan.

[0091] Embodiment 76 is the protease-activated pro-cytokine of any one of embodiments 1-61, wherein the targeting sequence binds to a sulfated glycoprotein.

[0092] Embodiment 77 is the protease-activated pro-cytokine of any one of embodiments 1-61, wherein the targeting sequence binds to hyaluronic acid.

[0093] Embodiment 78 is the protease-activated pro-cytokine of any one of embodiments 1-61, wherein the targeting sequence binds to fibronectin.

[0094] Embodiment 79 is the protease-activated pro-cytokine of any one of embodiments 1-61, wherein the targeting sequence binds to cadherin.

[0095] Embodiment 80 is the protease-activated pro-cytokine of any one of the preceding embodiments, wherein the targeting sequence is configured to bind its target in a pH-sensitive manner.

[0096] Embodiment 81 is the protease-activated pro-cytokine of the immediately preceding embodiment, wherein the targeting sequence has a higher affinity for its target at a pH below normal physiological pH than at normal physiological pH, optionally wherein the pH below normal physiological pH is below 7, or below 6.

[0097] Embodiment 82 is the protease-activated pro-cytokine of the immediately preceding embodiment, wherein the targeting sequence has a higher affinity for its target at a pH in the range of 5-7, e.g., 5-5.5, 5.5-6, 6-6.5, or 6.5-7, than at normal physiological pH.

[0098] Embodiment 83 is the protease-activated pro-cytokine of any one of the preceding embodiments, wherein the targeting sequence comprises one or more histidines, e.g., 1, 2, 3, 4, 5, 6, 7, 8, 9, or 10 histidines.

[0099] Embodiment 84 is the protease-activated pro-cytokine of any one of the preceding embodiments, wherein the targeting sequence comprises the sequence of any one of SEQ ID NOs: 641-662, or a variant having one or two mismatches relative to the sequence of any one of SEQ ID NOs: 641-662.

[0100] Embodiment 85 is the protease-activated pro-cytokine of the immediately preceding embodiment, wherein the targeting sequence comprises the sequence of any one of SEQ ID NOs: 641-662.

[0101] Embodiment 86 is the protease-activated pro-cytokine of any one of embodiments 80-86, wherein the targeting sequence is configured to bind, in a pH-sensitive manner, an extracellular matrix component, IgB (CD79b), an integrin, a cadherin, a heparan sulfate proteoglycan, a syndecan, or a fibronectin.

[0102] Embodiment 87 is the protease-activated pro-cytokine of the immediately preceding embodiment, wherein the extracellular matrix component is hyaluronic acid, heparin, heparan sulfate, or a sulfated glycoprotein.

[0103] Embodiment 88 is the protease-activated pro-cytokine of embodiment 86, wherein the targeting sequence is configured to bind a fibronectin in a pH-sensitive manner.

[0104] Embodiment 89 is the protease-activated pro-cytokine of any one of the preceding embodiments, wherein the cytokine polypeptide sequence is an interleukin polypeptide sequence.

[0105] Embodiment 90 is the protease-activated pro-cytokine of any one of the preceding embodiments, wherein the cytokine polypeptide sequence is capable of binding a receptor comprising CD132.

[0106] Embodiment 91 is the protease-activated pro-cytokine of any one of the preceding embodiments, wherein the cytokine polypeptide sequence is capable of binding a receptor comprising CD122.

[0107] Embodiment 92 is the protease-activated pro-cytokine of any one of the preceding embodiments, wherein the cytokine polypeptide sequence is capable of binding a receptor comprising CD25.

[0108] Embodiment 93 is the protease-activated pro-cytokine of any one of the preceding embodiments, wherein the cytokine polypeptide sequence is an IL-2 polypeptide sequence.

[0109] Embodiment 94 is the protease-activated pro-cytokine of the immediately preceding embodiment, wherein the IL-2 polypeptide sequence has at least 80, 85, 90, 95, 97, 98, or 99 percent identity to the sequence of any one of SEQ ID NOs: 1-4.

[0110] Embodiment 95 is the protease-activated pro-cytokine of the immediately preceding embodiment, wherein the IL-2 polypeptide sequence comprises the sequence of any one of SEQ ID NOs: 1-4.

[0111] Embodiment 96 is the protease-activated pro-cytokine of any one of embodiments 93-95, wherein the IL-2 polypeptide sequence is a human IL-2 polypeptide sequence.

[0112] Embodiment 97 is the protease-activated pro-cytokine of the immediately preceding embodiment, wherein the IL-2 polypeptide sequence comprises the sequence of SEQ ID NO: 1.

[0113] Embodiment 98 is the protease-activated pro-cytokine of any one of embodiments 93-95, wherein the IL-2 polypeptide sequence comprises the sequence of SEQ ID NO: 2.

[0114] Embodiment 99 is the protease-activated pro-cytokine of any one of embodiments 93-98, wherein the inhibitory polypeptide sequence comprises an IL-2 binding domain of an IL-2 receptor (IL-2R).

[0115] Embodiment 100 is the protease-activated pro-cytokine of the immediately preceding embodiment, wherein the inhibitory polypeptide sequence comprises an amino acid sequence having at least 80, 85, 90, 95, 97, 98, or 99 percent identity to the sequence of any one of SEQ ID NOs: 10-19.

[0116] Embodiment 101 is the protease-activated pro-cytokine of the immediately preceding embodiment, wherein the IL-2R is a human IL-2R.

[0117] Embodiment 102 is the protease-activated pro-cytokine of any one of embodiments 93-98, wherein the inhibitory polypeptide sequence comprises an IL-2-binding immunoglobulin domain.

[0118] Embodiment 103 is the protease-activated pro-cytokine of any one of embodiments 93-98, wherein the IL-2-binding immunoglobulin domain is a human IL-2-binding immunoglobulin domain.

[0119] Embodiment 104 is the protease-activated pro-cytokine of the immediately preceding embodiment, wherein the IL-2-binding immunoglobulin domain comprises a VL region comprising hypervariable regions (HVRs) HVR-1, HVR-2, and HVR-3 having the sequences of SEQ ID NOs: 33, 34, and 35, respectively, and a VH region comprising HVR-1, HVR-2, and HVR-3 having the sequences of SEQ ID NOs: 36, 37, and 38, respectively.

[0120] Embodiment 105 is the protease-activated pro-cytokine of any one of embodiments 102-104, wherein the IL-2-binding immunoglobulin domain comprises a VL region comprising an amino acid sequence having at least 80, 85, 90, 95, 97, 98, or 99 percent identity to the sequence of SEQ ID NO: 32 and a VH region comprising an amino acid sequence having at least 80, 85, 90, 95, 97, 98, or 99 percent identity to the sequence of SEQ ID NO: 33.

[0121] Embodiment 106 is the protease-activated pro-cytokine of the immediately preceding embodiment, wherein the IL-2-binding immunoglobulin domain comprises a VL region comprising the sequence of SEQ ID NO: 32 and a VH region comprising the sequence of SEQ ID NO: 33.

[0122] Embodiment 107 is the protease-activated pro-cytokine of any one of embodiments 102-104, wherein the IL-2-binding immunoglobulin domain is an scFv.

[0123] Embodiment 108 is the protease-activated pro-cytokine of the immediately preceding embodiment, wherein the IL-2-binding immunoglobulin domain comprises an amino acid sequence having at least 80, 85, 90, 95, 97, 98, or 99 percent identity to the sequence of SEQ ID NO: 30 or 31.

[0124] Embodiment 109 is the protease-activated pro-cytokine of the immediately preceding embodiment, wherein the IL-2-binding immunoglobulin domain comprises the sequence of SEQ ID NO: 30 or 31.

[0125] Embodiment 110 is the protease-activated pro-cytokine of embodiment 1, comprising the sequence of any one of SEQ ID NOs: 803-852.

[0126] Embodiment 111 is a pharmaceutical composition comprising the protease-activated pro-cytokine of any one of the preceding embodiments.

[0127] Embodiment 112 is the protease-activated pro-cytokine or pharmaceutical composition of any one of the preceding embodiments, for use in therapy.

[0128] Embodiment 113 is the protease-activated pro-cytokine or pharmaceutical composition of any one of the preceding embodiments, for use in treating a cancer.

[0129] Embodiment 114 is a method of treating a cancer, comprising administering the protease-activated pro-cytokine or pharmaceutical composition of any one of the preceding embodiments to a subject in need thereof.

[0130] Embodiment 115 is a use of the protease-activated pro-cytokine or pharmaceutical composition of any one of embodiments 1-110 for the manufacture of a medicament for treating cancer.

[0131] Embodiment 116 is the method, use, or protease-activated pro-cytokine for use of any one of embodiments 113-115, wherein the cancer is a solid tumor.

[0132] Embodiment 117 is the method, use, or protease-activated pro-cytokine for use of the immediately preceding embodiment, wherein the solid tumor is metastatic and/or unresectable.

[0133] Embodiment 118 is the method, use, or protease-activated pro-cytokine for use of any one of embodiments 113-117, wherein the cancer is a PD-L1-expressing cancer.

[0134] Embodiment 119 is the method, use, or protease-activated pro-cytokine for use of any one of embodiments 113-118, wherein the cancer is a melanoma, a colorectal cancer, a breast cancer, a pancreatic cancer, a lung cancer, a prostate cancer, an ovarian cancer, a cervical cancer, a gastric or gastrointestinal cancer, a lymphoma, a colon or colorectal cancer, an endometrial cancer, a thyroid cancer, or a bladder cancer.

[0135] Embodiment 120 is the method, use, or protease-activated pro-cytokine for use of any one of embodiments 113-119, wherein the cancer is a microsatellite instability-high cancer.

[0136] Embodiment 121 is the method, use, or protease-activated pro-cytokine for use of any one of embodiments 113-120, wherein the cancer is mismatch repair deficient.

[0137] Embodiment 122 is a nucleic acid encoding the protease-activated pro-cytokine of any one of embodiments 1-110.

[0138] Embodiment 123 is an expression vector comprising the nucleic acid of embodiment 121.

[0139] Embodiment 124 is a host cell comprising the nucleic acid of embodiment 121 or the vector of embodiment 122.

[0140] Embodiment 125 is a method of producing a protease-activated pro-cytokine, comprising culturing the host cell of embodiment 124 under conditions wherein the protease-activated pro-cytokine is produced.

[0141] Embodiment 126 is the method of the immediately preceding embodiment, further comprising isolating the protease-activated pro-cytokine.

[0142] Embodiment 127 is a method of boosting T regulatory cells and/or reducing inflammation or autoimmune activity, comprising administering the protease-activated pro-cytokine of any one of embodiments 1-110 to an area of interest in a subject, e.g., an area of inflammation in the subject.

[0143] Embodiment 128 is a method of treating an inflammatory or autoimmune disease or disorder in a subject, comprising administering the protease-activated pro-cytokine of any one of embodiments 1-110 to an area of interest in a subject, e.g., an area of inflammation or autoimmune activity in the subject.

### FIGURE LEGENDS

[0144] FIG. 1A shows an illustration of an exemplary cytokine prodrug structure and an SDS-PAGE gel characterizing a purified cytokine prodrug (Construct B). Abbreviations: PM, pharmacokinetic modulator; HMW, high molecular weight.

[0145] FIG. 1B shows an illustration of an exemplary cytokine prodrug structure comprising human IL-2 and IL-2Rα sequences and an MMP-cleavable linker, and an SDS-PAGE gel and Western blot characterizing a purified cytokine prodrug (Construct E). Abbreviations: Hu, human; MMP, matrix metalloprotease; other abbreviations are as above.

[0146] FIG. 1C shows an illustration of an exemplary cytokine prodrug structure comprising murine IL-2 and IL-2Rα sequences, an MMP-cleavable linker, additional linkers that include a targeting sequence (“RET Linker”), and an SDS-PAGE gel characterizing the indicated purified cytokine prodrugs.

[0147] FIG. 1D shows an illustration of an exemplary cytokine prodrug structure comprising human IL-2 and IL-2Rα sequences, an MMP-cleavable linker, additional linkers that include a targeting sequence (“RET Linker”), and an SDS-PAGE gel characterizing the indicated purified cytokine prodrugs.

[0148] FIG. 2A illustrates a cleavage reaction of a cytokine prodrug by a protease and shows Western blot evidence of cleavage of Construct A by MMP-9 at time points of 1, 2, and 4 hours and overnight. Each of the Western blots contains +MMP digestion lanes and −MMP mock-digestion lanes. Cleavage product was detectable at 1 hour, and the full-length cytokine prodrug was substantially undetectable at the overnight +MMP time point.

[0149] FIG. 2B illustrates a cleavage reaction of a cytokine prodrug comprising a pharmacokinetic modulator by a protease and shows Western blot evidence of cleavage of Construct B by MMP-9 at time points of 1, 4, and 20 hours. Each of the Western blots contains +MMP digestion lanes and −MMP mock-digestion lanes. Cleavage product was detectable at 1 hour, and the full-length cytokine prodrug gave only a faint band at the 20 hour +MMP time point.

[0150] FIGS. 2C-E illustrate cleavage reactions of a cytokine prodrug comprising a pharmacokinetic modulator by a protease and shows Western blot evidence of cleavage of Construct E by MMP-9 at time points of 1, 4, and 22 hours (2C); and cleavage of the indicated constructs at 18 hours (2D and 2E). Constructs BBB, CCC, and FFF in FIG. 2E that did not show substantial cleavage had scrambled MMP sites. Each of the Western blots contains +MMP9 digestion lanes and −MMP9 mock-digestion lanes. Cleavage product was detectable at 1 hour, and the full-length cytokine prodrug gave essentially no band at the 22 hour +MMP time point.

[0151] FIG. 3A shows results of a CTLL-2 proliferation assay with Construct A or cleavage products thereof. Construct A was cleaved by MMP-9 and the resulting products were incubated with CTLL-2 cells. The data shows that MMP-9 treated Construct A stimulates CTLL-2 cell proliferation in a dose dependent manner and exhibits 10-fold greater activity than untreated Construct A (EC50 comparison). EC50 values are shown in nM.

[0152] FIG. 3B shows results of a CTLL-2 proliferation assay with Construct B or cleavage products thereof. Construct B was cleaved by MMP-9 and the resulting products were incubated with CTLL-2 cells. For comparison, mIL2 was also incubated with CTLL-2 cells. The data show that MMP-9 treated Construct B stimulates CTLL-2 cell proliferation in a dose dependent manner. Uncleaved Construct B was minimally stimulatory. EC50 values are shown in nM.

[0153] FIG. 3C-FIG. 3J show HEK-Blue™ IL2 assay results. Cells were treated with various concentrations Construct E, uncleaved or cleaved with mMMP9 for 22 hours (FIG. 3C); human IL2 (FIG. 3D); Construct B, uncleaved or cleaved with mMMP9 for 19 hours; Construct J, Construct K, Construct F, Construct L, or Construct I, each uncleaved or cleaved with mMMP9 for 22 hours (FIGS. 3E-J, respectively); and the EC50 was determined based on OD630 as a readout of IL-2 stimulation.

[0154] FIG. 3K-FIG. 3L show results of a CTLL-2 proliferation assay with Construct M, Construct N, or cleavage products thereof. Cleavage was by MMP-2 for 2 hr and the resulting products were incubated with CTLL-2 cells. The data show that MMP-2 treated Construct M and Construct N stimulate CTLL-2 cell proliferation in a dose dependent manner. EC50 values are shown in nM.

[0155] FIG. 3M shows Coomassie-stained SDS-PAGE results comparing Construct E, Construct M, and Construct N. Construct M and Construct N showed decreased aggregation and greater stability and homogeneity.

[0156] FIG. 3N-FIG. 3P show results of a CTLL-2 proliferation assay with Construct 0, Construct P, Construct Q, or cleavage products thereof. Cleavage was by MMP2 for 2 hr and the resulting products were incubated with CTLL-2 cells. The data show that MMP2 treated Construct 0, Construct P, and Construct Q stimulate CTLL-2 cell proliferation in a dose dependent manner. EC50 values are shown in nM.

[0157] FIG. 3Q-FIG. 3Y show results of a HEK-Blue™ IL2 assay with the indicated construct or cleavage products thereof. Cleavage was by MMP9 for either 18 hr or 22 hr and the resulting products were incubated with HEK-Blue™ IL2 cells. EC50 was determined based on OD630 as a readout of IL-2 stimulation. The data show that MMP9 treated constructs stimulate IL-2 in a dose dependent manner. EC50 values are shown in nM.

[0158] FIG. 4 illustrates a serum stability assay using Construct B and provides results thereof indicating that Construct B was stable when incubated with serum collected from control or tumor-bearing over a time course of 72 hours. Concentrations were measured by quantitative sandwich ELISA using an mIL2 capture antibody and mIL2Rα detection antibody.

[0159] FIG. 5 shows a study design, graphical results, and pharmacokinetic (PK) parameters for Construct B in mice. PK parameters were calculated using WinNonlin 7.0 (non-compartmental model).

[0160] FIG. 6A shows a study design and results for intratumoral dosing of Construct A in mice injected subcutaneously with MC38 cells at day-7 and then treated with Construct A, vehicle, or human IL-2 on each of days 0-4 and 7-11. Construct A substantially inhibited tumor growth. In contrast, human TL-2 adversely affected tumor control relative to vehicle. Necrosis attributable to tumor growth was observed in the control and human IL-2 groups.

[0161] FIG. 6B shows a study design in which mice treated as in FIG. 6A were re-challenged with 2×10⁶ MC38 cells at day 40. Tumor growth was rejected, indicating that the treatment resulted in a durable response including anti-tumor immune memory.

[0162] FIG. 7A shows a study design in mice injected subcutaneously with MC38 cells at day-10 where Construct B or vehicle was administered intravenously once per three days (Q3D) during a three week period (eight total administrations). Essentially no systemic toxicity was observed. Construct B-treated mice showed virtually no tumor growth after initiation of treatment, in contrast to vehicle-treated mice where tumor growth continued through day 21. Following day 21, several vehicle-treated mice were euthanized due to tumor volume exceeding 3000 mm³ and accordingly subsequent tumor volume data for vehicle-treated mice is not shown as it would be biased toward mice with smaller tumor volumes relative to the population average through day 21.

[0163] FIG. 7B shows body weight data for the same mice as in FIG. 7A. Mouse body weight was substantially constant during treatment with Construct B, consistent with lack of any apparent toxicity.

[0164] FIG. 8 shows immunohistochemistry results for tumor-infiltrating immune cells at day 21 for vehicle group tissues and at day 25 for Construct B treated tumors of the study described above for FIG. 7A. Significantly more immune cells of all tested types were observed in Construct B-treated mice compared to vehicle-treated mice. Additionally, the proportion of cells with markers consistent with a effector T cell phenotype was substantially greater than the proportion of CD4+Foxp3+(regulatory T) cells. Statistical analysis was performed using unpaired t test by Prism 5.0 software. P value between groups was calculated, and the differences with p value <0.05 were considered statistically significant. * p<0.05, ** p<0.01, *** p<0.001.

[0165] FIG. 9 shows quantification of MMP activity in the indicated tumor-bearing mouse models by fluorescence intensity over time following MMPSense 680™ injection.

[0166] FIG. 10A-FIG. 10D show tumor volume over time for mice treated with vehicle or Construct B as indicated in the indicated cancer models.

[0167] FIG. 11A-FIG. 11D show tumor volume over time (11A) and levels of the indicated enzymes (11B-D) for mice treated with vehicle or Construct B as indicated in the B16F10 melanoma model.

[0168] FIG. 12A-FIG. 12D show tumor volume over time (12A) and levels of the indicated enzymes (12B-D) for mice treated with vehicle or Construct B as indicated in the RM-1 prostate cancer model.

[0169] FIG. 13A shows MMP activity, measured as described for FIG. 9, in the indicated groups.

[0170] FIG. 13B-FIG. 13C show tumor volume over time for mice treated with vehicle or Construct B as indicated in the indicated cancer models.

[0171] FIG. 14A-B show schematic structures of the indicated linkers and binding of MMP linker peptides containing heparin binding motifs to heparin-agarose beads.

[0172] FIG. 14C shows cartoons of the structures of the indicated constructs and heparin binding assay results for the indicated constructs. Assays were performed at pH 7.5 unless indicated as performed at pH 6.

[0173] FIG. 14D shows schematic structures of the indicated linkers and binding of the indicated peptides to fibronectin at the indicated pH values.

[0174] FIG. 14E shows fibronectin binding assay results for the indicated constructs. Assays were performed at pH 7.5 unless indicated as performed at pH 6.

[0175] FIG. 14F shows schematic structures of the indicated linkers and binding of MMP linker peptides containing collagen binding motifs to beads associated with collagen IV.

[0176] FIG. 14G shows an anti-mIL2 Western blot of input (I), supernatant (S), collagen-bound (C) and control agarose bound (A) fractions from pulldown assays performed with the indicated constructs.

[0177] FIG. 15A shows fluorescent images of mice treated with the indicated constructs as described in Example 15.

[0178] FIG. 15B shows tumor-associated fluorescence measured in mice treated with the indicated constructs as described in Example 15.

[0179] FIG. 15C-H show amounts of the indicated constructs present in tumor lysates prepared as described in Example 16. Here and throughout, mpk means mg/kg.

[0180] FIG. 15I-K show amounts of the indicated constructs present in serum samples prepared as described in Example 16.

[0181] FIG. 16A-B show tumor volume over time for groups treated with the indicated constructs as described in Example 17.

[0182] FIG. 17A-B show IFN-γ levels in tumors following treatment with the indicated constructs as described in Example 18.

[0183] FIG. 18A-E show exemplary arrangements of elements in cytokine prodrugs comprising various combinations of a cytokine polypeptide sequence (CYTOKINE), a pharmacokinetic modulator (PK EXT), a protease-cleavable polypeptide sequence in a linker (PRO-LNK), an inhibitory polypeptide sequence (INHIBITOR), and in some cases one or more targeting sequences (RET LNK) or additional linkers (LNK). The targeting sequences are shown as white text on a dark background. In FIGS. 18A and 18C, the pharmacokinetic modulator is on the same side of the protease-cleavable sequence as the inhibitory polypeptide sequence, so that it would not impact the pharmacokinetics of the cytokine polypeptide sequence. In FIGS. 18B and 18D, the pharmacokinetic modulator is on the same side of the protease-cleavable sequence as the cytokine polypeptide sequence, so that it would impact the pharmacokinetics of the cytokine polypeptide sequence. In FIG. 18E, a protease-cleavable sequence is present on each side of the pharmacokinetic modulator. This arrangement can produce intermediate results as the pharmacokinetic modulator would be separated from the cytokine polypeptide sequence more slowly than the inhibitory polypeptide sequence.

### DETAILED DESCRIPTION OF CERTAIN EMBODIMENTS

[0184] This specification describes exemplary embodiments and applications of the disclosure. The disclosure, however, is not limited to these exemplary embodiments and applications or to the manner in which the exemplary embodiments and applications operate or are described herein. The term “or” is used in an inclusive sense, i.e., equivalent to “and/or,” unless the context dictates otherwise. It is noted that, as used in this specification and the appended claims, the singular forms “a,” “an,” and “the,” and any singular use of any word, include plural referents unless expressly and unequivocally limited to one referent. As used herein, the terms “comprise,” “include,” and grammatical variants thereof are intended to be non-limiting, such that recitation of items in a list is not to the exclusion of other like items that can be substituted or added to the listed items. Section divisions in the specification are provided for the convenience of the reader only and do not limit any combination of elements discussed. In case of any contradiction or conflict between material incorporated by reference and the expressly described content provided herein, the expressly described content controls.

### Overview

[0185] Provided herein are protease-activated pro-cytokines (also referred to herein as cytokine prodrugs) comprising a linker comprising a protease-cleavable linker and a targeting sequence described herein, e.g., a targeting sequence configured to bind an extracellular matrix component, an integrin, or a syndecan; or configured to bind an extracellular matrix component, IgB (CD79b), an integrin, a cadherin, a heparan sulfate proteoglycan, a syndecan, or a fibronectin in a pH-sensitive manner; or a targeting sequence comprising the sequence of any one of SEQ ID NOs: 180-662. The cleavable linker can be between a cytokine polypeptide sequence and an inhibitory polypeptide sequence, such that the ability of the cytokine polypeptide sequence to activate immune cells is reduced or eliminated compared to a free cytokine polypeptide sequence. Proteolysis of the linker can liberate the cytokine so that it can activate immune cells.

[0186] In some embodiments, the protease-cleavable linker is cleavable by a protease expressed at higher levels in the tumor microenvironment (TME) than in healthy tissue of the same type. In some embodiments, the protease-cleavable linker is a matrix metalloprotease (MMP)-cleavable linker, such as any of the MMP-cleavable linkers described herein. Without wishing to be bound by any particular theory, increased expression of proteases, including but not necessarily limited to MMPs, in the tumor microenvironment (TME) can provide a mechanism for achieving selective or preferential activation of the cytokine prodrug at or near a tumor site. Certain protease-cleavable linkers described herein are considered particularly suitable for achieving such selective or preferential activation.

[0187] In other embodiments, the cytokine prodrug comprises a targeting sequence, e.g., a targeting sequence that binds an extracellular matrix component, an integrin, or a syndecan, or is configured to bind fibronectin in a pH-sensitive manner. The targeting sequence can facilitate accumulation and/or increased residence time of the cytokine prodrug and/or the active cytokine in the ECM. In some embodiments, a targeting sequence is combined with a protease-cleavable linker cleavable by a protease expressed at higher levels in the TME and/or cleavable by an MMP.

[0188] In any of the foregoing embodiments, the cytokine prodrug may further comprise a pharmacokinetic modulator, e.g., which extends the half-life of the prodrug and which may optionally also extend the half-life of the active cytokine.

[0189] Sequences of exemplary cytokine prodrugs and components thereof are shown in Tables 1 and 2. In Table 1, “X_{Hy}” designates a hydrophobic amino acid residue. In some embodiments, the hydrophobic amino acid residue is any one of glycine (Gly), alanine (Ala), valine (Val), leucine (Leu), isoleucine (Ile), proline (Pro), phenylalanine (Phe), methionine (Met), and tryptophan (Trp). In some embodiments, the hydrophobic amino acid residue is any one of Ala, Leu, Val, Ile, Pro, Phe, Met, and Trp. In some embodiments, the hydrophobic amino acid residue is any one of Leu, Val, Ile, Pro, Phe, Met, and Trp. In some embodiments, the hydrophobic amino acid residue is any one of Ala, Leu, Val, Ile, Phe, Met, and Trp. In some embodiments, the hydrophobic amino acid residue is any one of Leu, Val, Ile, Phe, Met, and Trp. “(Pip)” represents piperidine. “(Hof)” represents homophenylalanine. “(Cit)” represents citrulline. “(Et)” represents ethionine. “C(me)” represents methylcysteine. In certain sequences, underlining is used to indicate mutated positions.

[0190] This disclosure further provides uses of these cytokine prodrugs, e.g., for treating cancer. In some embodiments, the cytokine prodrug is selectively or preferentially cleaved in the tumor microenvironment, which may result in beneficial effects, e.g., improved recruitment and/or activation of immune cells in the vicinity of the tumor, and/or reduced systemic exposure to active cytokines.

TABLE 1
Table of Sequences of Cytokine Prodrugs and Components Thereof

| | | | | | |
|---|---|---|---|---|---|
| SEQ | | | | | |
| ID | | | | | |
| NO | Description | Sequence | Species | Function | Notes |

IL-2 sequences

| | | | | | |
|---|---|---|---|---|---|
| 1 | h IL-2 | APTSSSTKKTQLQLEHLLLDLQMILNGINNYKNPKLTRMLTFKFYMPKKATELK | human | cytokine | wild-type |
| | | HLQCLEEELKPLEEVLNLAQSKNFHLRPRDLISNINVIVLELKGSETTFMCEYA | | | |
| | | DETATIVEFLNRWITFCQSIISTLT | | | |
| 2 | h IL-2 | APTSSSTKKTQLQLEHLLLDLQMILNGINNYKNPKLTRMLTFKFYMPKKATELK | human | cytokine | C125 to S |
| | (C125S) | HLQCLEEELKPLEEVLNLAQSKNFHLRPRDLISNINVIVLELKGSETTFMCEYA | | | mutation |
| | | DETATIVEFLNRWITFSQSIISTLT | | | |
| 3 | m IL-2 | APTSSSTSSSTAEAQQQQQQQQQQQQHLEQLLMDLQELLSRMENYRNLKLPRML | mouse | cytokine | wild-type |
| | | TFKFYLPKQATELKDLQCLEDELGPLRHVLDLTQSKSFQLEDAENFISNIRVTV | | | |
| | | VKLKGSDNTFECQFDDESATVVDFLRRWIAFCQSIISTSPQ | | | |
| 4 | m IL-2 | APTSSSTSSSTAEAQQQQQQQQQQQQHLEQLLMDLQELLSRMENYRNLKLPRML | mouse | cytokine | C140 to S |
| | (C140S) | TFKFYLPKQATELKDLQCLEDELGPLRHVLDLTQSKSFQLEDAENFISNIRVTV | | | mutation |
| | | VKLKGSDNTFECQFDDESATVVDFLRRWIAFSQSIISTSPQ | | | |
| 5-9 | Not Used | | | | |

Blockers: IL-2R sequences

| | | | | | |
|---|---|---|---|---|---|
| 10 | h IL-2Ralpha | ELCDDDPPEIPHATFKAMAYKEGTMLNCECKRGFRRIKSGSLYMLCTGNSSHSS | human | blocker | wild-type |
| | | WDNQCQCTSSATRNTTKQVTPQPEEQKERKTTEMQSPMQPVDQASLPGHCREPP | | | amino acids |
| | | PWENEATERIYHFVVGQMVYYQCVQGYRALHRGPAESVCKMTHGKTRWTQPQLI | | | 1-219 |
| | | CTGEMETSQFPGEEKPQASPEGRPESETSCLVTTTDFQIQTEMAATMETSIFTT | | | |
| | | EYQ | | | |
| 11 | h IL-2Ralpha | ELCDDDPPEIPHATFKAMAYKEGTMLNCECKRGFRRIKSGSLYMLCTGNSSHSS | human | blocker | sushi domain |
| | (1-63) | WDNQCQCTS | | | 1 wild-type |
| 12 | h IL-2Ralpha | ELCDDDPPEIPHATFKAMAYKEGTILNCECKRGFRRIKSGSLYMLCTGNSSHSS | human | blocker | M25 to I |
| | (M25I) | WDNQCQCTSSATRNTTKQVTPQPEEQKERKTTEMQSPMQPVDQASLPGHCREPP | | | mutation |
| | | PWENEATERIYHFVVGQMVYYQCVQGYRALHRGPAESVCKMTHGKTRWTQPQLI | | | |
| | | CTGEMETSQFPGEEKPQASPEGRPESETSCLVTTTDFQIQTEMAATMETSIFTT | | | |
| | | EYQ | | | |
| 13 | h IL-2Ralpha | ELCDDDPPEIPHATFKAMAYKEGTMLNCECKRGFRRIKSGSVYMLCTGNSSHSS | human | blocker | L42 to V |
| | (L42V) | WDNQCQCTSSATRNTTKQVTPQPEEQKERKTTEMQSPMQPVDQASLPGHCREPP | | | mutation |
| | | PWENEATERIYHFVVGQMVYYQCVQGYRALHRGPAESVCKMTHGKTRWTQPQLI | | | |
| | | CTGEMETSQFPGEEKPQASPEGRPESETSCLVTTTDFQIQTEMAATMETSIFTT | | | |
| | | EYQ | | | |
| 14 | h IL-2Ralpha | ELCDDDPPEIPHATFKAMAYKEGTILNCECKRGFRRIKSGSVYMLCTGNSSHSS | human | blocker | M25 to I |
| | (M25I; L42V) | WDNQCQCTSSATRNTTKQVTPQPEEQKERKTTEMQSPMQPVDQASLPGHCREPP | | | mutation; L42 |
| | | PWENEATERIYHFVVGQMVYYQCVQGYRALHRGPAESVCKMTHGKTRWTQPQLI | | | to V mutation |
| | | CTGEMETSQFPGEEKPQASPEGRPESETSCLVTTTDFQIQTEMAATMETSIFTT | | | |
| | | EYQ | | | |
| 15 | Human | LNTTILTPNGNEDTTADFFLTTMPTDSLSVSTLPLPEVQCFVFNVEYMNCTWNS | human | blocker | |
| | IL2Rgamma | SSEPQPTNLTLHYWYKNSDNDKVQKCSHYLFSEEITSGCQLQKKEIHLYQTFVV | | | |
| | polypeptide | QLQDPREPRRQATQMLKLQNLVIPWAPENLTLHKLSESQLELNWNNRFLNHCLE | | | |
| | sequence | HLVQYRTDWDHSWTEQSVDYRHKFSLPSVDGQKRYTFRVRSRFNPLCGSAQHWS | | | |
| | | EWSHPIHWGSNTSKENPFLFALEA | | | |
| 16 | Human | AVNGTSQFTCFYNSRANISCVWSQDGALQDTSCQVHAWPDRRRWNQTCELLPVS | human | blocker | |
| | IL2Rbeta | QASWACNLILGAPDSQKLTTVDIVTLRVLCREGVRWRVMAIQDFKPFENLRLMA | | | |
| | polypeptide | PISLQVVHVETHRCNISWEISQASHYFERHLEFEARTLSPGHTWEEAPLLTLKQ | | | |
| | sequence | KQEWICLETLTPDTQYEFQVRVKPLQGEFTTWSPWSQPLAFRTKPAALGKDT | | | |
| 17 | chimeric IL- | ELCLYDPPEVPNATFKALSYKNGTILNCECKRGFRRLKELVYMRCLGNSWSSNC | human/ | blocker | mouse |
| | 2Ralpha | QCTSSATRNTTKQVTPQPEEQKERKTTEMQSPMQPVDQASLPGHCREPPPWENE | mouse | | IL2Ralpha (1- |
| | | ATERIYHFVVGQMVYYQCVQGYRALHRGPAESVCKMTHGKTRWTQPQLICTGEM | | | 58) - hu |
| | | ETSQFPGEEKPQASPEGRPESETSCLVTTTDFQIQTEMAATMETSIFTTEYQ | | | IL2Ralpha |
| | | | | | (64-219) |
| 18 | m IL-2Ralpha | ELCLYDPPEVPNATFKALSYKNGTILNCECKRGFRRLKELVYMRCLGNSWSSNC | mouse | blocker | wild-type |
| | | QCTSNSHDKSRKQVTAQLEHQKEQQTTTDMQKPTQSMHQENLTGHCREPPPWKH | | | amino acids |
| | | EDSKRIYHFVEGQSVHYECIPGYKALQRGPAISICKMKCGKTGWTQPQLTCVDE | | | 1-215 |
| | | REHHRFLASEESQGSRNSSPESETSCPITTTDFPQPTETTAMTETFVLTMEYK | | | |
| 19 | m IL-2Ralpha | ELCLYDPPEVPNATFKALSYKNGTILNCECKRGFRRLKELVYMRCLGNSWSSNC | mouse | blocker | sushi domain |
| | (1-58) | QCTS | | | 1 wild-type |
| 20 | h IL-2Ralpha | ELCLYDPPEIPHATFKAMAYKEGTILNCECKRGFRRIKSGSLYMLCTGNSSH | human | blocker | D4 to L |
| | (1-219) | SSWDNQCQCTSSATRNTTKQVTPQPEEQKERKTTEMQSPMQPVDQASLPGHC | | | mutation; D5 |
| | M25I/D4L/D5Y | REPPPWENEATERIYHFVVGQMVYYQCVQGYRALHRGPAESVCKMTHGKTRW | | | to Y |
| | | TQPQLICTGEMETSQFPGEEKPQASPEGRPESETSCLVTTTDFQ | | | mutation; |
| | | IQTEMAATMETSIFTTEYQ | | | M25 to I |
| | | | | | mutation |
| 21 | h IL-2Ralpha | ELCLYDPPEIPHATFKAMAYKEGTMLNCECKRGFRRIKSGSVYMLCTGNSSH | human | blocker | D4 to L |
| | (1-219) | SSWDNQCQCTSSATRNTTKQVTPQPEEQKERKTTEMQSPMQPVDQASLPGHC | | | mutation; D5 |
| | L42V/D4L/ | REPPPWENEATERIYHFVVGQMVYYQCVQGYRALHRGPAESVCKMTHGKTRW | | | to Y |
| | D5Y | TQPQLICTGEMETSQFPGEEKPQASPEGRPESETSCLVTTTDFQ | | | mutation; |
| | | IQTEMAATMETSIFTTEYQ | | | L42 to V |
| | | | | | mutation |
| 22 | h IL-2Ralpha | ELCLYDPPEIPHATFKAMAYKEGTILNCECKRGFRRIKSGSVYMLCTGNSSH | human | blocker | D4 to L |
| | (1-219) | SSWDNQCQCTSSATRNTTKQVTPQPEEQKERKTTEMQSPMQPVDQASLPGHC | | | mutation; D5 |
| | M25I/L42V/ | REPPPWENEATERIYHFVVGQMVYYQCVQGYRALHRGPAESVCKMTHGKTRW | | | to Y |
| | D4L/D5Y | TQPQLICTGEMETSQFPGEEKPQASPEGRPESETSCLVTTTDFQ | | | mutation; |
| | | IQTEMAATMETSIFTTEYQ | | | M25 to I |
| | | | | | mutation; |
| | | | | | L42 to V |
| | | | | | mutation |
| 23 | h IL-2Ralpha | ELCLYDPPEIPHATFKAMAYKEGTMLNCECKRGFRRIKSGSLYMLCTGNSSH | human | blocker | D4 to L |
| | (1- | SSWDNQCQCTSSATRNTTKQVTPQPEEQKERKTTEMQSPMQPVDQASLPGHC | | | mutation; D5 |
| | 219)D4L/D5Y | REPPPWENEATERIYHFVVGQMVYYQCVQGYRALHRGPAESVCKMTHGKTRW | | | to Y |
| | | TQPQLICTGEMETSQFPGEEKPQASPEGRPESETSCLVTTTDFQ | | | mutation |
| | | IQTEMAATMETSIFTTEYQ | | | |
| 24 | h IL-2Ralpha | ELCDDDPPEIPHATFKAMAYKEGTMLNCECKRGFRRIKELVYMLCTGNSSHS | human | blocker | Wild-type |
| | (1-219) | SWDNQCQCTSSATRNTTKQVTPQPEEQKERKTTEMQSPMQPVDQASLPGHCR | | | residues 39- |
| | SGSL₃₉- | EPPPWENEATERIYHFVVGQMVYYQCVQGYRALHRGPAESVCKMTHGKTRWT | | | 42 replaced |
| | ₄₂ELV | QPQLICTGEMETSQFPGEEKPQASPEGRPESETSCLVTTTDFQ | | | with ELV |
| | | IQTEMAATMETSIFTTEYQ | | | |
| 25 | h IL-2Ralpha | ELCDDDPPEIPHATFKAMAYKEGTMLNCECKRGFRRIKSGSLYMLCTGNSSH | human | blocker | Wild-type |
| | (1-192) | SSWDNQCQCTSSATRNTTKQVTPQPEEQKERKTTEMQSPMQPVDQASLPGHC | | | amino acids |
| | | REPPPWENEATERIYHFVVGQMVYYQCVQGYRALHRGPAESVCKMTHGKTRW | | | 1-192 |
| | | TQPQLICTGEMETSQFPGEEKPQASPEGRPESETSC | | | |
| 26 | h IL-2Ralpha | ELCDDDPPEIPHATFKAMAYKEGTILNCECKRGFRRIKSGSLYMLCTGNSSH | human | blocker | M25 to I |
| | (1-192)M25I | SSWDNQCQCTSSATRNTTKQVTPQPEEQKERKTTEMQSPMQPVDQASLPGHC | | | mutation |
| | | REPPPWENEATERIYHFVVGQMVYYQCVQGYRALHRGPAESVCKMTHGKTRW | | | |
| | | TQPQLICTGEMETSQFPGEEKPQASPEGRPESETSC | | | |
| 27 | h IL-2Ralpha | ELCDDDPPEIPHATFKAMAYKEGTMLNCECKRGFRRIKSGSVYMLCTGNSSH | human | blocker | L42 to V |
| | (1-192)L42V | SSWDNQCQCTSSATRNTTKQVTPQPEEQKERKTTEMQSPMQPVDQASLPGHC | | | mutation |
| | | REPPPWENEATERIYHFVVGQMVYYQCVQGYRALHRGPAESVCKMTHGKTRW | | | |
| | | TQPQLICTGEMETSQFPGEEKPQASPEGRPESETSC | | | |
| 28 | h IL-2Ralpha | ELCLYDPPEIPHATFKAMAYKEGTMLNCECKRGFRRIKSGSLYMLCTGNSSH | human | blocker | D4 to L |
| | (1- | SSWDNQCQCTSSATRNTTKQVTPQPEEQKERKTTEMQSPMQPVDQASLPGHC | | | mutation; D5 |
| | 192)D4L/D5Y | REPPPWENEATERIYHFVVGQMVYYQCVQGYRALHRGPAESVCKMTHGKTRW | | | to Y |
| | | TQPQLICTGEMETSQFPGEEKPQASPEGRPESETSC | | | mutation |
| 29 | h IL-2Ralpha | ELCDDDPPEIPHATFKAMAYKEGTMLNCECKRGFRRIKELVYMLCTGNSSHS | human | blocker | Wild-type |
| | (1-192) | SWDNQCQCTSSATRNTTKQVTPQPEEQKERKTTEMQSPMQPVDQASLPGHCR | | | residues 39- |
| | SGSL₃₉- | EPPPWENEATERIYHFVVGQMVYYQCVQGYRALHRGPAESVCKMTHGKTRWT | | | 42 replaced |
| | ₄₂ELV | QPQLICTGEMETSQFPGEEKPQASPEGRPESETSC | | | with ELV |

IL2 Blockers: anti-IL2 sequences

| | | | | | |
|---|---|---|---|---|---|
| 30 | scFv2 | QSVLTQPPSVSGAPGQRVTISCTGTSSNIGAHYDVHWYQQFPGTAPKRLIYGNN | human | blocker | wild-type |
| | | NRPSGVPARFSGSKSGTSASLAITGLQAEDEADYYCQSYDRSLRGWVFGGGTKL | | | |
| | | TVLGEGKSSGSGSESKASEVQLVESGGGLVQPGRSLRLSCAASGFTFDDYAMHW | | | |
| | | VRQAPGKGLEWVSGISWNSGSIGYADSVKGRFTISRDNSKNTLYLQMNSLRAED | | | |
| | | TAVYYCAKDVNWNYGYYFDYWGQGTLVTVSS | | | |
| 31 | scFv2 (18 mer | QSVLTQPPSVSGAPGQRVTISCTGTSSNIGAHYDVHWYQQFPGTAPKRLIYGNN | human | blocker | 18 mer linker |
| | linker) | NRPSGVPARFSGSKSGTSASLAITGLQAEDEADYYCQSYDRSLRGWVFGGGTKL | | | between VL |
| | | TVLGGSTSGSGKPGSGEGSTKGEVQLVESGGGLVQPGRSLRLSCAASGFTFDDY | | | and VH |
| | | AMHWVRQAPGKGLEWVSGISWNSGSIGYADSVKGRFTISRDNSKNTLYLQMNSL | | | |
| | | RAEDTAVYYCAKDVNWNYGYYFDYWGQGTLVTVSS | | | |
| 32 | VL domain of | QSVLTQPPSVSGAPGQRVTISCTGTSSNIGAHYDVHWYQQFPGTAPKRLIYGNN | human | blocker | wild-type |
| | scFv2 | NRPSGVPARFSGSKSGTSASLAITGLQAEDEADYYCQSYDRSLRGWVFGGGTKL | | | |
| | | TVLG | | | |
| 33 | VH domain of | EVQLVESGGGLVQPGRSLRLSCAASGFTFDDYAMHWVRQAPGKGLEWVSGISWN | human | blocker | wild-type |
| | scFv2 | SGSIGYADSVKGRFTISRDNSKNTLYLQMNSLRAEDTAVYYCAKDVNWNYGYYF | | | |
| | | DYWGQGTLVTVSS | | | |
| 34 | scFv2 VL | TGTSSNIGAHYDVH | | | |
| | HVR1 | | | | |
| 35 | scFv2 VL | GNNNRPS | | | |
| | HVR2 | | | | |
| 36 | scFv2 VL | QSYDRSLRGWV | | | |
| | HVR3 | | | | |
| 37 | scFv2 VH | DDYAMH | | | |
| | HVR1 | | | | |
| 38 | scFv2 VH | GISWNSGSIGYADSVKG | | | |
| | HVR2 | | | | |
| 39 | scFv2 VH | KDVNWNYGYYFDY | | | |
| | HVR3 | | | | |
| 747 | scFv183 | DIVMTQSPDSLAVSLGERATINCKSSQSVLYSNNNKNYLAWYQQKPGQPPKL | human | blocker | linker |
| | | LIYGASTRESWVPDRFSGSGSGTDFTLTISSLQAEDVAVYYCQQWYYYPYTF | | | between VL |
| | | GQGTKVEIKGGGGSGGGGSGGGSGGGGSEVQLLESGGGLVQPGGSLRLSCAA | | | and VH |
| | | SGFTFSSYYMSWVRQAPGKGLEWVSDISGRGGQTNYADSVKGRFTISRDNSK | | | |
| | | NTLYLQMNSLRAEDTAVYYCARGGGSFANWGRGTLVTVSS | | | |
| 748 | VL domain of | DIVMTQSPDSLAVSLGERATINCKSSQSVLYSNNNKNYLAWYQQKPGQPPKL | human | blocker | |
| | scFv183 | LIYGASTRESWVPDRFSGSGSGTDFTLTISSLQAEDVAVYYCQQWYYYPYTF | | | |
| | | GQGTKVEIK | | | |
| 749 | VH domain of | EVQLLESGGGLVQPGGSLRLSCAASGFTFSSYYMSWVRQAPGKGLEWVSDIS | human | blocker | |
| | scFv183 | GRGGQTNYADSVKGRFTISRDNSKNTLYLQMNSLRAEDTAVYYCARGGGSFA | | | |
| | | NWGRGTLVTVSS | | | |
| 750 | scFv183 VL | KSSQSVLYSNNNKNYLA | | | |
| | HVR1 | | | | |
| 751 | scFv183 VL | GASTRES | | | |
| | HVR2 | | | | |
| 752 | scFv183 VL | QQWYYYPYT | | | |
| | HVR3 | | | | |
| 753 | scFv183 VH | SSYYMS | | | |
| | HVR1 | | | | |
| 754 | scFv183 VH | DISGRGGQTNYADSVKG | | | |
| | HVR2 | | | | |
| 755 | scFv183 VH | RGGGSFAN | | | |
| | HVR3 | | | | |

Blockers: IL-2R sequences

| | | | | | |
|---|---|---|---|---|---|
| 40 | h IL-2Ralpha | ELCLYDPPEIPHATFKAMAYKEGTILNCECKRGFRRIKSGSLYMLCTGNSSH | human | blocker | D4 to L |
| | (1- | SSWDNQCQCTSSATRNTTKQVTPQPEEQKERKTTEMQSPMQPVDQASLPGHC | | | mutation; D5 |
| | 192)M25I/ | REPPPWENEATERIYHFVVGQMVYYQCVQGYRALHRGPAESVCKMTHGKTRW | | | to Y |
| | D4L/D5Y | TQPQLICTGEMETSQFPGEEKPQASPEGRPESETSC | | | mutation; |
| | | | | | M25 to I |
| | | | | | mutation |
| 41 | h IL-2Ralpha | ELCDDDPPEIPHATFKAMAYKEGTILNCECKRGFRRIKSGSVYMLCTGNSSH | human | blocker | M25 to I |
| | (1- | SSWDNQCQCTSSATRNTTKQVTPQPEEQKERKTTEMQSPMQPVDQASLPGHC | | | mutation; |
| | 192)M25I/ | REPPPWENEATERIYHFVVGQMVYYQCVQGYRALHRGPAESVCKMTHGKTRW | | | L42 to V |
| | L42V | TQPQLICTGEMETSQFPGEEKPQASPEGRPESETSC | | | mutation |
| 42 | h IL-2Ralpha | ELCLYDPPEIPHATFKAMAYKEGTMLNCECKRGFRRIKSGSVYMLCTGNSSH | human | blocker | D4 to L |
| | (1-192) | SSWDNQCQCTSSATRNTTKQVTPQPEEQKERKTTEMQSPMQPVDQASLPGHC | | | mutation; D5 |
| | D4L/D5Y/ | REPPPWENEATERIYHFVVGQMVYYQCVQGYRALHRGPAESVCKMTHGKTRW | | | to Y |
| | L42V | TQPQLICTGEMETSQFPGEEKPQASPEGRPESETSC | | | mutation; |
| | | | | | L42 to V |
| | | | | | mutation |
| 43 | h IL-2Ralpha | ELCLYDPPEIPHATFKAMAYKEGTILNCECKRGFRRIKSGSVYMLCTGNSSH | human | blocker | D4 to L |
| | (1-192) | SSWDNQCQCTSSATRNTTKQVTPQPEEQKERKTTEMQSPMQPVDQASLPGHC | | | mutation; D5 |
| | M25I/D4L/ | REPPPWENEATERIYHFVVGQMVYYQCVQGYRALHRGPAESVCKMTHGKTRW | | | to Y |
| | D5Y/L42V | TQPQLICTGEMETSQFPGEEKPQASPEGRPESETSC | | | mutation; |
| | | | | | M25 to I |
| | | | | | mutation; |
| | | | | | L42 to V |
| | | | | | mutation |
| 44 | h IL-2Ralpha | ELCDDDPPEIPHATFKAMAYKEGTMLNCECKRGFRRIKSGSLYMLCTGNSSH | human | blocker | Wild-type |
| | (1-178) | SSWDNQCQCTSSATRNTTKQVTPQPEEQKERKTTEMQSPMQPVDQASLPGHC | | | amino acids |
| | | REPPPWENEATERIYHFVVGQMVYYQCVQGYRALHRGPAESVCKMTHGKTRW | | | 1-178 |
| | | TQPQLICTGEMETSQFPGEEKP | | | |
| 45 | h IL-2Ralpha | ELCDDDPPEIPHATFKAMAYKEGTILNCECKRGFRRIKSGSLYMLCTGNSSH | human | blocker | M25 to I |
| | (1-178) M25I | SSWDNQCQCTSSATRNTTKQVTPQPEEQKERKTTEMQSPMQPVDQASLPGHC | | | mutation |
| | | REPPPWENEATERIYHFVVGQMVYYQCVQGYRALHRGPAESVCKMTHGKTRW | | | |
| | | TQPQLICTGEMETSQFPGEEKP | | | |
| 46 | h IL-2Ralpha | ELCDDDPPEIPHATFKAMAYKEGTMLNCECKRGFRRIKSGSVYMLCTGNSSH | human | blocker | L42 to V |
| | (1-178) L42V | SSWDNQCQCTSSATRNTTKQVTPQPEEQKERKTTEMQSPMQPVDQASLPGHC | | | mutation |
| | | REPPPWENEATERIYHFVVGQMVYYQCVQGYRALHRGPAESVCKMTHGKTRW | | | |
| | | TQPQLICTGEMETSQFPGEEKP | | | |
| 47 | h IL-2Ralpha | ELCLYDPPEIPHATFKAMAYKEGTMLNCECKRGFRRIKSGSLYMLCTGNSSH | human | blocker | D4 to L |
| | (1-178) | SSWDNQCQCTSSATRNTTKQVTPQPEEQKERKTTEMQSPMQPVDQASLPGHC | | | mutation; D5 |
| | D4L/D5Y | REPPPWENEATERIYHFVVGQMVYYQCVQGYRALHRGPAESVCKMTHGKTRW | | | to Y |
| | | TQPQLICTGEMETSQFPGEEKP | | | mutation |
| 48 | h IL-2Ralpha | ELCDDDPPEIPHATFKAMAYKEGTMLNCECKRGFRRIKELVYMLCTGNSSHS | human | blocker | Wild-type |
| | (1-178) | SWDNQCQCTSSATRNTTKQVTPQPEEQKERKTTEMQSPMQPVDQASLPGHCR | | | residues 39- |
| | SGSL₃₉- | EPPPWENEATERIYHFVVGQMVYYQCVQGYRALHRGPAESVCKMTHGKTRWT | | | 42 replaced |
| | ₄₂ELV | QPQLICTGEMETSQFPGEEKP | | | with ELV |
| 49 | h IL-2Ralpha | ELCDDDPPEIPHATFKAMAYKEGTILNCECKRGFRRIKSGSVYMLCTGNSSH | human | blocker | M25 to I |
| | (1-178) | SSWDNQCQCTSSATRNTTKQVTPQPEEQKERKTTEMQSPMQPVDQASLPGHC | | | mutation; |
| | M25I/L42V | REPPPWENEATERIYHFVVGQMVYYQCVQGYRALHRGPAESVCKMTHGKTRW | | | L42 to V |
| | | TQPQLICTGEMETSQFPGEEKP | | | mutation |
| 50 | h IL-2Ralpha | ELCLYDPPEIPHATFKAMAYKEGTMLNCECKRGFRRIKSGSVYMLCTGNSSH | human | blocker | D4 to L |
| | (1-178) | SSWDNQCQCTSSATRNTTKQVTPQPEEQKERKTTEMQSPMQPVDQASLPGHC | | | mutation; D5 |
| | D4L/D5Y/ | REPPPWENEATERIYHFVVGQMVYYQCVQGYRALHRGPAESVCKMTHGKTRW | | | to Y |
| | L42V | TQPQLICTGEMETSQFPGEEKP | | | mutation; |
| | | | | | L42 to V |
| | | | | | mutation |
| 51 | h IL-2Ralpha | ELCLYDPPEIPHATFKAMAYKEGTILNCECKRGFRRIKSGSVYMLCTGNSSH | human | blocker | D4 to L |
| | (1-178) | SSWDNQCQCTSSATRNTTKQVTPQPEEQKERKTTEMQSPMQPVDQASLPGHC | | | mutation; D5 |
| | D4L/D5Y/ | REPPPWENEATERIYHFVVGQMVYYQCVQGYRALHRGPAESVCKMTHGKTRW | | | to Y |
| | M25I/ L42V | TQPQLICTGEMETSQFPGEEKP | | | mutation; |
| | | | | | M25 to I |
| | | | | | mutation; |
| | | | | | L42 to V |
| | | | | | mutation |
| 52-69 | Not Used | | | | |

Pharmacokinetic modulators

| | | | | | |
|---|---|---|---|---|---|
| 70 | h IgG1 Fc | DKTHTCPPCPAPELLGGPSVFLFPPKPKDTLMISRTPEVTCVVVDVSHEDPEVK | human | half-life | C-terminal K |
| | | FNWYVDGVEVHNAKTKPREEQYNSTYRVVSVLTVLHQDWLNGKEYKCKVSNKAL | | extension | residue |
| | | PAPIEKTISKAKGQPREPQVYTLPPSRDELTKNQVSLTCLVKGFYPSDIAVEWE | | | deleted |
| | | SNGQPENNYKTTPPVLDSDGSFFLYSKLTVDKSRWQQGNVFSCSVMHEALHNHY | | | |
| | | TQKSLSLSPG | | | |
| 71 | Human IgG1 | DKTHTCPPCPAPELLGGPSVFLFPPKPKDTLMISRTPEVTCVVVDVSHEDPEVK | human | half-life | |
| | K392D | FNWYVDGVEVHNAKTKPREEQYNSTYRVVSVLTVLHQDWLNGKEYKCKVSNKAL | | extension | |
| | K409D Fc | PAPIEKTISKAKGQPREPQVYTLPPSRDELTKNQVSLTCLVKGFYPSDIAVEWE | | | |
| | domain | SNGQPENNYDTTPPVLDSDGSFFLYSDLTVDKSRWQQGNVFSCSVMHEALHNHY | | | |
| | polypeptide | TQKSLSLSPG | | | |
| | sequence | | | | |
| 72 | Human serum | RGVFRRDAHKSEVAHRFKDLGEENFKALVLIA | human | half-life | wild-type |
| | albumin | FAQYLQQCPFEDHVKLVNEVTEFAKTCVADESAENCDKSLHTLFGDKLCT | | extension | |
| | | VATLRETYGEMADCCAKQEPERNECFLQHKDDNPNLPRLVRPEVDVMCTA | | | |
| | | FHDNEETFLKKYLYEIARRHPYFYAPELLFFAKRYKAAFTECCQAADKAACLLP | | | |
| | | KLDELRDEGKASSAKQRLKCASLQKFGERAFKAWAVARLSQRFPKA | | | |
| | | EFAEVSKLVTDLTKVHTECCHGDLLECADDRADLAKYICENQDSISSKLK | | | |
| | | ECCEKPLLEKSHCIAEVENDEMPADLPSLAADFVESKDVCKNYAEAKDVF | | | |
| | | LGMFLYEYARRHPDYSVVLLLRLAKTYETTLEKCCAAADPHECYAKVFDE | | | |
| | | FKPLVEEPQNLIKQNCELFEQLGEYKFQNALLVRYTKKVPQVSTPTLVEV | | | |
| | | SRNLGKVGSKCCKHPEAKRMPCAEDYLSVVLNQLCVLHEKTPVSDRVTKC | | | |
| | | CTESLVNRRPCFSALEVDETYVPKEFNAETFTFHADICTLSEKERQIKKQ | | | |
| | | TALVELVKHKPKATKEQLKAVMDDFAAFVEKCCKADDKETCFAEEGKKLV | | | |
| | | AASQAALGL | | | |
| 73 | m IgG1 Fc | GCKPCICTVPEVSSVFIFPPKPKDVLTITLTPKVTCVVVDISKDDPEVQFSWFV | mouse | half-life | wild-type |
| | | DDVEVHTAQTQPREEQFNSTFRSVSELPIMHQDWLNGKEFKCRVNSAAFPAPIE | | extension | |
| | | KTISKTKGRPKAPQVYTIPPPKEQMAKDKVSLTCMITDFFPEDITVEWQWNGQP | | | |
| | | AENYKNTQPIMDTDGSYFVYSKLNVQKSNWEAGNTFTCSVLHEGLHNHHTEKSL | | | |
| | | SHSPGK | | | |
| 74 | Murine IgG1 | GCKPCICTVPEVSSVFIFPPKPKDVLMITLTPKVTCVVVDISKDDPEVQFSWFV | mouse | half-life | |
| | T252M Fc | DDVEVHTAQTQPREEQFNSTFRSVSELPIMHQDWLNGKEFKCRVNSAAFPAPIE | | extension | |
| | domain | KTISKTKGRPKAPQVYTIPPPKEQMAKDKVSLTCMITDFFPEDITVEWQWNGQP | | | |
| | polypeptide | AENYKNTQPIMDTDGSYFVYSKLNVQKSNWEAGNTFTCSVLHEGLHNHHTEKSL | | | |
| | sequence | SHSPG | | | |
| 75-79 | Not Used | | | | |
| 756 | IgG1 Fc | DKTHTCPPCPAPELLGGPSVFLFPPKPKDTLMISRTPEVTCVVVDVSHEDPE | human | half-life | Knob |
| | (K360E/K409W) | VKFNWYVDGVEVHNAKTKPREEQYNSTYRVVSVLTVLHQDWLNGKEYKCKVS | | extension | mutations |
| | Knob | NKALPAPIEKTISKAKGQPREPQVYTLPPSRDELTENQVSLTCLVKGFYPSD | | | |
| | | IAVEWESNGQPENNYKTTPPVLDSDGSFFLYSWLTVDKSRWQQGNVFSCSVM | | | |
| | | HEALHNHYTQKSLSLSPG | | | |
| 757 | h IgG1 Fc | DKTHTCPPCPAPELLGGPSVFLFPPKPKDTLMISRTPEVTCVVVDVSHEDPE | human | half-life | Hole |
| | (Q347R/D399V/ | VKFNWYVDGVEVHNAKTKPREEQYNSTYRVVSVLTVLHQDWLNGKEYKCKVS | | extension | mutations |
| | F405T) | NKALPAPIEKTISKAKGQPREPRVYTLPPSRDELTKNQVSLTCLVKGFYPSD | | | |
| | Hole | IAVEWESNGQPENNYKTTPPVLVSDGSFTLYSKLTVDKSRWQQGNVFSCSVM | | | |
| | | HEALHNHYTQKSLSLSPG | | | |

MMP cleavable segments

| | | |
|---|---|---|
| 80 | MMP cleavage | GPLGVRG |
| | site | |
| | polypeptide | |
| | sequence | |
| 81 | G112631 | GPLGVRG |
| | polypeptide | |
| | sequence | |
| 82 | G112632 | GPLGLRG |
| | polypeptide | |
| | sequence | |
| 83 | G112633 | GPLGLAR |
| | polypeptide | |
| | sequence | |
| 84 | G112634 | GPAALVGA |
| | polypeptide | |
| | sequence | |
| 85 | G112635 | GPAALIGG |
| | polypeptide | |
| | sequence | |
| 86 | G112636 | GPLNLVGR |
| | polypeptide | |
| | sequence | |
| 87 | G112637 | GPAGLVAD |
| | polypeptide | |
| | sequence | |
| 88 | G112638 | GPANLVAP |
| | polypeptide | |
| | sequence | |
| 89 | G112639 | VPLSLYSG |
| | polypeptide | |
| | sequence | |
| 90 | G112640 | SGESPAYYTA |
| | polypeptide | |
| | sequence | |
| 91 | MMP | PXXX_{Hy} |
| | consensus | |
| | motif | |
| 92 | MMP-2 | (L/I)XXX_{Hy} |
| | consensus | |
| | motif | |
| 93 | MMP-2 | X_{Hy}SXL |
| | consensus | |
| | motif | |
| 94 | MMP-2 | HXXX_{Hy} |
| | consensus | |
| | motif | |
| 95-99 | Not Used | |

IL-2 Fusion polypeptides

| | | |
|---|---|---|
| 100 | Construct A | APTSSSTSSSTAEAQQQQQQQQQQQQHLEQLLMDLQELLSRMENYRNLKLPRML |
| | polypeptide | TFKFYLPKQATELKDLQCLEDELGPLRHVLDLTQSKSFQLEDAENFISNIRVTV |
| | sequence: | VKLKGSDNTFECQFDDESATVVDFLRRWIAFCQSIISTSPQSGGGGSGGGGGPL |
| | mIL2- | GVRGGGGGSGGGGSELCLYDPPEVPNATFKALSYKNGTILNCECKRGFRRLKEL |
| | 2x(SG4) - | VYMRCLGNSWSSNCQCTSNSHDKSRKQVTAQLEHQKEQQTTTDMQKPTQSMHQE |
| | MMPcs1 - | NLTGHCREPPPWKHEDSKRIYHFVEGQSVHYECIPGYKALQRGPAISICKMKCG |
| | 2x(G4S) - | KTGWTQPQLTCVDEREHHRFLASEESQGSRNSSPESETSCPITTTDFPQPTETT |
| | IL2Ralpha - | AMTETFVLTMEYKHHHHHH |
| | 6His | |
| 101 | Construct B | APTSSSTSSSTAEAQQQQQQQQQQQQHLEQLLMDLQELLSRMENYRNLKLPRML |
| | polypeptide | TFKFYLPKQATELKDLQCLEDELGPLRHVLDLTQSKSFQLEDAENFISNIRVTV |
| | sequence: m | VKLKGSDNTFECQFDDESATVVDFLRRWIAFCQSIISTSPQSGGGGSGGGGGPL |
| | IL2-2x(SG4) - | GVRGGGGGSGGGGSELCLYDPPEVPNATFKALSYKNGTILNCECKRGFRRLKEL |
| | MMPcs1 - 2x | VYMRCLGNSWSSNCQCTSNSHDKSRKQVTAQLEHQKEQQTTTDMQKPTQSMHQE |
| | (G4S) - | NLTGHCREPPPWKHEDSKRIYHFVEGQSVHYECIPGYKALQRGPAISICKMKCG |
| | IL2Ralpha - | KTGWTQPQLTCVDEREHHRFLASEESQGSRNSSPESETSCPITTTDFPQPTETT |
| | mIgG1 Fc | AMTETFVLTMEYKGCKPCICTVPEVSSVFIFPPKPKDVLTITLTPKVTCVVVDI |
| | | SKDDPEVQFSWFVDDVEVHTAQTQPREEQFNSTFRSVSELPIMHQDWLNGKEFK |
| | | CRVNSAAFPAPIEKTISKTKGRPKAPQVYTIPPPKEQMAKDKVSLTCMITDFFP |
| | | EDITVEWQWNGQPAENYKNTQPIMDTDGSYFVYSKLNVQKSNWEAGNTFTCSVL |
| | | HEGLHNHHTEKSLSHSPGK |
| 102 | Construct C | APTSSSTSSSTAEAQQQQQQQQQQQQHLEQLLMDLQELLSRMENYRNLKLPRML |
| | polypeptide | TFKFYLPKQATELKDLQCLEDELGPLRHVLDLTQSKSFQLEDAENFISNIRVTV |
| | sequence: | VKLKGSDNTFECQFDDESATVVDFLRRWIAFSQSIISTSPQSGGGGSGGGGGPL |
| | mIL2(C140S) - | GVRGGGGGSGGGGSELCLYDPPEVPNATFKALSYKNGTILNCECKRGFRRLKEL |
| | 2x(SG4) - | VYMRCLGNSWSSNCQCTSNSHDKSRKQVTAQLEHQKEQQTTTDMQKPTQSMHQE |
| | MMPcs1 - | NLTGHCREPPPWKHEDSKRIYHFVEGQSVHYECIPGYKALQRGPAISICKMKCG |
| | 2x(G4S) - | KTGWTQPQLTCVDEREHHRFLASEESQGSRNSSPESETSCPITTTDFPQPTETT |
| | IL2Ralpha - | AMTETFVLTMEYKGCKPCICTVPEVSSVFIFPPKPKDVLMITLTPKVTCVVVDI |
| | mIgG1 | SKDDPEVQFSWFVDDVEVHTAQTQPREEQFNSTFRSVSELPIMHQDWLNGKEFK |
| | Fc(T252M)- | CRVNSAAFPAPIEKTISKTKGRPKAPQVYTIPPPKEQMAKDKVSLTCMITDFFP |
| | 6xHIS | EDITVEWQWNGQPAENYKNTQPIMDTDGSYFVYSKLNVQKSNWEAGNTFTCSVL |
| | | HEGLHNHHTEKSLSHSPGHHHHHH |
| 103 | Construct R | APTSSSTSSSTAEAQQQQQQQQQQQQHLEQLLMDLQELLSRMENYRNLKLPRML |
| | polypeptide | TFKFYLPKQATELKDLQCLEDELGPLRHVLDLTQSKSFQLEDAENFISNIRVTV |
| | sequence: | VKLKGSDNTFECQFDDESATVVDFLRRWIAFSQSIISTSPQSGGGGSGGGGGPL |
| | mIL2(C140S)- | GVRGGGGGSGGGGSELCLYDPPEVPNATFKALSYKNGTILNCECKRGFRRLKEL |
| | 2x(SG4) - | VYMRCLGNSWSSNCQCTSNSHDKSRKQVTAQLEHQKEQQTTTDMQKPTQSMHQE |
| | MMPcs1 - | NLTGHCREPPPWKHEDSKRIYHFVEGQSVHYECIPGYKALQRGPAISICKMKCG |
| | 2x(G4S) - | KTGWTQPQLTCVDEREHHRFLASEESQGSRNSSPESETSCPITTTDFPQPTETT |
| | IL2Ralpha - | AMTETFVLTMEYKDKTHTCPPCPAPELLGGPSVFLFPPKPKDTLMISRTPEVTC |
| | hu IgG1 Fc- | VVVDVSHEDPEVKFNWYVDGVEVHNAKTKPREEQYNSTYRVVSVLTVLHQDWLN |
| | 6xHIS | GKEYKCKVSNKALPAPIEKTISKAKGQPREPQVYTLPPSRDELTKNQVSLTCLV |
| | | KGFYPSDIAVEWESNGQPENNYKTTPPVLDSDGSFFLYSKLTVDKSRWQQGNVF |
| | | SCSVMHEALHNHYTQKSLSLSPGHHHHHH |
| 104 | Construct D | APTSSSTKKTQLQLEHLLLDLQMILNGINNYKNPKLTRMLTFKFYMPKKATELK |
| | polypeptide | HLQCLEEELKPLEEVLNLAQSKNFHLRPRDLISNINVIVLELKGSETTFMCEYA |
| | Sequence: | DETATIVEFLNRWITFSQSIISTLTSGGGGSGGGGGPLGVRGGGGGSGGGGSEL |
| | mIL2(C140S)- | CDDDPPEIPHATFKAMAYKEGTMLNCECKRGFRRIKSGSLYMLCTGNSSHSSWD |
| | 2x(SG4) - | NQCQCTSSATRNTTKQVTPQPEEQKERKTTEMQSPMQPVDQASLPGHCREPPPW |
| | MMPcs1 - | ENEATERIYHFVVGQMVYYQCVQGYRALHRGPAESVCKMTHGKTRWTQPQLICT |
| | 2x(G4S) - | GEMETSQFPGEEKPQASPEGRPESETSCLVTTTDFQIQTEMAATMETSIFTTEY |
| | SIL2Ralpha - | QDKTHTCPPCPAPELLGGPSVFLFPPKPKDTLMISRTPEVTCVVVDVSHEDPEV |
| | mIgG1 | KFNWYVDGVEVHNAKTKPREEQYNSTYRVVSVLTVLHQDWLNGKEYKCKVSNKA |
| | Fc(T252M)- | LPAPIEKTISKAKGQPREPQVYTLPPSRDELTKNQVSLTCLVKGFYPSDIAVEW |
| | 6xHIS | ESNGQPENNYKTTPPVLDSDGSFFLYSKLTVDKSRWQQGNVFSCSVMHEALHNH |
| | | YTQKSLSLSPGHHHHHH |
| 105 | mIgG1 Fc - | GCKPCICTVPEVSSVFIFPPKPKDVLTITLTPKVTCVVVDISKDDPEVQFSWFV |
| | Murine IL2 - | DDVEVHTAQTQPREEQFNSTFRSVSELPIMHQDWLNGKEFKCRVNSAAFPAPIE |
| | 2x(SG4) - | KTISKTKGRPKAPQVYTIPPPKEQMAKDKVSLTCMITDFFPEDITVEWQWNGQP |
| | MMPcs1 - 2x | AENYKNTQPIMDTDGSYFVYSKLNVQKSNWEAGNTFTCSVLHEGLHNHHTEKSL |
| | (G4S) - | SHSPGKAPTSSST`SSSTAEAQQQQQQQQQQQQHLEQLLMDLQELLSRMENYRN |
| | IL2Ralpha | LKLPRMLTFKFYLPKQATELKDLQCLEDELGPLRHVLDLTQSKSFQLEDAENFI |
| | (long kinetic | SNIRVTVVKLKGSDNTFECQFDDESATVVDFLRRWIAFCQSIISTSPQSGGGGS |
| | IL2 post | GGGGGPLGVRGGGGGSGGGGSELCLYDPPEVPNATFKALSYKNGTILNCECKRG |
| | cleavage) | FRRLKELVYMRCLGNSWSSNCQCTSNSHDKSRKQVTAQLEHQKEQQTTTDMQKP |
| | polypeptide | TQSMHQENLTGHCREPPPWKHEDSKRIYHFVEGQSVHYECIPGYKALQRGPAIS |
| | Sequence | ICKMKCGKTGWTQPQLTCVDEREHHRFLASEESQGSRNSSPESETSCPITTTDF |
| | | PQPTETTAMTETFVLTMEYK |
| 106 | Construct E | APTSSSTKKTQLQLEHLLLDLQMILNGINNYKNPKLTRMLTFKFYMPKKATELK |
| | polypeptide | HLQCLEEELKPLEEVLNLAQSKNFHLRPRDLISNINVIVLELKGSETTFMCEYA |
| | sequence: | DETATIVEFLNRWITFSQSIISTLTSGGGGSGGGGGPLGVRGGGGGSGGGGSEL |
| | HuIL2(C125S) - | CDDDPPEIPHATFKAMAYKEGTMLNCECKRGFRRIKSGSLYMLCTGNSSHSSWD |
| | 2x(SG4) - | NQCQCTSSATRNTTKQVTPQPEEQKERKTTEMQSPMQPVDQASLPGHCREPPPW |
| | MMPcs1 - | ENEATERIYHFVVGQMVYYQCVQGYRALHRGPAESVCKMTHGKTRWTQPQLICT |
| | 2x(G4S) - | GEMETSQFPGEEKPQASPEGRPESETSCLVTTTDFQIQTEMAATMETSIFTTEY |
| | IL2Ralpha | QDKTHTCPPCPAPELLGGPSVFLFPPKPKDTLMISRTPEVTCVVVDVSHEDPEV |
| | hu IgG1 Fc - | KFNWYVDGVEVHNAKTKPREEQYNSTYRVVSVLTVLHQDWLNGKEYKCKVSNKA |
| | 6xHIS | LPAPIEKTISKAKGQPREPQVYTLPPSRDELTKNQVSLTCLVKGFYPSDIAVEW |
| | | ESNGQPENNYKTTPPVLDSDGSFFLYSKLTVDKSRWQQGNVFSCSVMHEALHNH |
| | | YTQKSLSLSPGHHHHHH |
| 107 | Construct S | APTSSSTKKTQLQLEHLLLDLQMILNGINNYKNPKLTRMLTFKFYMPKKATELK |
| | polypeptide | HLQCLEEELKPLEEVLNLAQSKNFHLRPRDLISNINVIVLELKGSETTFMCEYA |
| | sequence: | DETATIVEFLNRWITFCQSIISTLTSGGGGSGGGGGPLGVRGGGGGSGGGGSEL |
| | hIL2- 2x(SG4) - | CDDDPPEIPHATFKAMAYKEGTMLNCECKRGFRRIKSGSLYMLCTGNSSHSSWD |
| | MMPcs1 - | NQCQCTSSATRNTTKQVTPQPEEQKERKTTEMQSPMQPVDQASLPGHCREPPPW |
| | 2x(G4S) - | ENEATERIYHFVVGQMVYYQCVQGYRALHRGPAESVCKMTHGKTRWTQPQLICT |
| | hIL2Ralpha - | GEMETSQFPGEEKPQASPEGRPESETSCLVTTTDFQIQTEMAATMETSIFTTEY |
| | hIgG1Fc_mut | QDKTHTCPPCPAPELLGGPSVFLFPPKPKDTLMISRTPEVTCVVVDVSHEDPEV |
| | 1 (K392D; | KFNWYVDGVEVHNAKTKPREEQYNSTYRVVSVLTVLHQDWLNGKEYKCKVSNKA |
| | K409D) | LPAPIEKTISKAKGQPREPQVYTLPPSRDELTKNQVSLTCLVKGFYPSDIAVEW |
| | | ESNGQPENNYDTTPPVLDSDGSFFLYSDLTVDKSRWQQGNVFSCSVMHEALHNH |
| | | YTQKSLSLSPGHHHHHH |
| 108 | Construct T | DKTHTCPPCPAPELLGGPSVFLFPPKPKDTLMISRTPEVTCVVVDVSHEDPEVK |
| | polypeptide | FNWYVDGVEVHNAKTKPREEQYNSTYRVVSVLTVLHQDWLNGKEYKCKVSNKAL |
| | sequence | PAPIEKTISKAKGQPREPQVYTLPPSRKELTKNQVSLTCLVKGFYPSDIAVEWE |
| | including | SNGQPENNYKTTPPVLKSDGSFFLYSKLTVDKSRWQQGNVFSCSVMHEALHNHY |
| | hlgG1 Fc_mut | TQKSLSLSPGHHHHHH |
| | 2 (D356K; | |
| | D399K) | |
| 109 | hu IgG1 Fc - | DKTHTCPPCPAPELLGGPSVFLFPPKPKDTLMISRTPEVTCVVVDVSHEDPEVK |
| | Hu | FNWYVDGVEVHNAKTKPREEQYNSTYRVVSVLTVLHQDWLNGKEYKCKVSNKAL |
| | IL2(C125S)- | PAPIEKTISKAKGQPREPQVYTLPPSRDELTKNQVSLTCLVKGFYPSDIAVEWE |
| | 2x(SG4) - | SNGQPENNYKTTPPVLDSDGSFFLYSKLTVDKSRWQQGNVFSCSVMHEALHNHY |
| | MMPcs1 - | TQKSLSLSPGAPTSSSTKKTQLQLEHLLLDLQMILNGINNYKNPKLTRMLTFKF |
| | 2x(G4S) - | YMPKKATELKHLQCLEEELKPLEEVLNLAQSKNFHLRPRDLISNINVIVLELKG |
| | IL2Ralpha | SETTFMCEYADETATIVEFLNRWITFSQSIISTLTSGGGGSGGGGGPLGVRGGG |
| | Polypeptide | GGSGGGGSELCDDDPPEIPHATFKAMAYKEGTMLNCECKRGFRRIKSGSLYMLC |
| | Sequence | TGNSSHSSWDNQCQCTSSATRNTTKQVTPQPEEQKERKTTEMQSPMQPVDQASL |
| | | PGHCREPPPWENEATERIYHFVVGQMVYYQCVQGYRALHRGPAESVCKMTHGKT |
| | | RWTQPQLICTGEMETSQFPGEEKPQASPEGRPESETSCLVTTTDFQIQTEMAAT |
| | | METSIFTTEYQ |
| 110 | hIL2- 2x(SG4) - | APTSSSTKKTQLQLEHLLLDLQMILNGINNYKNPKLTRMLTFKFYMPKKATELK |
| | MMPcs1 - | HLQCLEEELKPLEEVLNLAQSKNFHLRPRDLISNINVIVLELKGSETTFMCEYA |
| | 2x(G4S) - | DETATIVEFLNRWITFCQSIISTLTSGGGGSGGGGGPLGVRGGGGGSGGGGSAV |
| | hIL2Rbeta | NGTSQFTCFYNSRANISCVWSQDGALQDTSCQVHAWPDRRRWNQTCELLPVSQA |
| | hIgG1Fc | SWACNLILGAPDSQKLTTVDIVTLRVLCREGVRWRVMAIQDFKPFENLRLMAPI |
| | (Construct U) | SLQVVHVETHRCNISWEISQASHYFERHLEFEARTLSPGHTWEEAPLLTLKQKQ |
| | polypeptide | EWICLETLTPDTQYEFQVRVKPLQGEFTTWSPWSQPLAFRTKPAALGKDTDKTH |
| | Sequence | TCPPCPAPELLGGPSVFLFPPKPKDTLMISRTPEVTCVVVDVSHEDPEVKFNWY |
| | | VDGVEVHNAKTKPREEQYNSTYRVVSVLTVLHQDWLNGKEYKCKVSNKALPAPI |
| | | EKTISKAKGQPREPQVYTLPPSRDELTKNQVSLTCLVKGFYPSDIAVEWESNGQ |
| | | PENNYKTTPPVLDSDGSFFLYSKLTVDKSRWQQGNVFSCSVMHEALHNHYTQKS |
| | | LSLSPG |
| 111 | hIL2- 2x(SG4) - | APTSSSTKKTQLQLEHLLLDLQMILNGINNYKNPKLTRMLTFKFYMPKKATELK |
| | MMPcs1 - | HLQCLEEELKPLEEVLNLAQSKNFHLRPRDLISNINVIVLELKGSETTFMCEYA |
| | 2x(G4S) - | DETATIVEFLNRWITFCQSIISTLTSGGGGSGGGGGPLGVRGGGGGSGGGGSLN |
| | hIL2Rgamma - | TTILTPNGNEDTTADFFLTTMPTDSLSVSTLPLPEVQCFVFNVEYMNCTWNSSS |
| | hIgG1Fc | EPQPTNLTLHYWYKNSDNDKVQKCSHYLFSEEITSGCQLQKKEIHLYQTFVVQL |
| | polypeptide | QDPREPRRQATQMLKLQNLVIPWAPENLTLHKLSESQLELNWNNRFLNHCLEHL |
| | sequence | VQYRTDWDHSWTEQSVDYRHKFSLPSVDGQKRYTFRVRSRFNPLCGSAQHWSEW |
| | | SHPIHWGSNTSKENPFLFALEADKTHTCPPCPAPELLGGPSVFLFPPKPKDTLM |
| | | ISRTPEVTCVVVDVSHEDPEVKFNWYVDGVEVHNAKTKPREEQYNSTYRVVSVL |
| | | TVLHQDWLNGKEYKCKVSNKALPAPIEKTISKAKGQPREPQVYTLPPSRDELTK |
| | | NQVSLTCLVKGFYPSDIAVEWESNGQPENNYKTTPPVLDSDGSFFLYSKLTVDK |
| | | SRWQQGNVFSCSVMHEALHNHYTQKSLSLSPG |
| 112- | Not Used | |
| 119 | | |

Other

| | | |
|---|---|---|
| 120 | Gly-Ser rich | SGGGGSGGGG |
| | linker | |
| | polypeptide | |
| | sequence | |
| 121- | Not Used | |
| 129 | | |

Fusion polypeptides (DNA coding sequences)

| | | |
|---|---|---|
| 130 | Construct A | ATGGGTTGGTCCTGCATCATCCTGTTCCTGGTCGCCACCGCCACTGGGGTCCAC |
| | DNA sequence | TCCGCACCTACATCATCATCAACTTCATCCTCCACCGCTGAGGCTCAGCAACAA |
| | (mIL2- | CAGCAACAACAGCAGCAGCAGCAGCAGCATCTGGAGCAGCTGCTGATGGACCTG |
| | 2x(SG4) - | CAGGAGCTGCTGTCCAGAATGGAGAACTACCGCAATCTGAAGCTGCCAAGGATG |
| | MMPcs1 - | CTGACCTTCAAGTTTTATCTGCCCAAGCAGGCCACAGAGCTGAAGGACCTGCAG |
| | 2x(G4S) - | TGCCTGGAGGATGAGCTGGGCCCACTGAGGCACGTGCTGGACCTGACCCAGAGC |
| | IL2Ralpha - | AAGTCTTTCCAGCTGGAGGATGCTGAGAACTTTATCTCCAATATCCGGGTGACC |
| | 6His) | GTGGTGAAGCTGAAGGGCAGCGACAACACATTCGAGTGCCAGTTTGACGATGAG |
| | | TCTGCCACCGTGGTGGATTTCCTGAGGCGGTGGATCGCTTTTTGTCAGAGCATC |
| | | ATCTCCACAAGCCCTCAGTCTGGAGGAGGTGGCAGCGGAGGAGGAGGTGGCCCA |
| | | CTGGGCGTGAGGGGTGGCGGCGGCGGCTCTGGCGGCGGCGGCTCCGAGCTGTGC |
| | | CTGTACGACCCCCCTGAGGTGCCCAATGCCACCTTCAAGGCTCTGTCTTATAAG |
| | | AACGGCACAATCCTGAATTGCGAGTGTAAGAGGGGCTTTAGACGCCTGAAGGAG |
| | | CTGGTGTACATGCGGTGTCTGGGCAACTCCTGGTCCAGCAATTGCCAGTGTACC |
| | | TCTAACTCCCATGACAAGAGCAGAAAGCAGGTGACAGCCCAGCTGGAGCACCAG |
| | | AAGGAGCAGCAGACCACAACCGATATGCAGAAGCCCACCCAGTCTATGCACCAG |
| | | GAGAATCTGACAGGCCATTGCAGAGAGCCACCCCCTTGGAAGCACGAGGATAGC |
| | | AAGCGCATCTATCATTTCGTGGAGGGCCAGTCTGTGCACTACGAGTGTATCCCC |
| | | GGCTATAAGGCCCTGCAGAGAGGCCCTGCTATCTCCATCTGCAAGATGAAGTGT |
| | | GGCAAGACCGGCTGGACACAGCCTCAGCTGACCTGCGTGGACGAGAGGGAGCAC |
| | | CATCGGTTCCTGGCTAGCGAGGAGTCTCAGGGCTCCCGCAACTCTTCCCCTGAG |
| | | AGCGAGACATCTTGTCCAATCACAACCACAGATTTTCCACAGCCCACCGAGACA |
| | | ACCGCTATGACAGAGACCTTCGTGCTGACTATGGAATACAAACACCACCACCAC |
| | | CACCACTAATGA |
| 131 | Construct B | ATGGGTTGGTCCTGCATCATCCTGTTCCTGGTCGCCACCGCCACTGGGGTCCAC |
| | DNA | TCCGCACCTACATCATCATCAACTTCATCCTCCACCGCTGAGGCTCAGCAACAA |
| | sequence: m | CAGCAACAACAGCAGCAGCAGCAGCAGCATCTGGAGCAGCTGCTGATGGACCTG |
| | IL2-2x(SG4) - | CAGGAGCTGCTGTCCAGAATGGAGAACTACCGCAATCTGAAGCTGCCAAGGATG |
| | MMPcs1 - 2x | CTGACCTTCAAGTTTTATCTGCCCAAGCAGGCCACAGAGCTGAAGGACCTGCAG |
| | (G4S) - | TGCCTGGAGGATGAGCTGGGCCCACTGAGGCACGTGCTGGACCTGACCCAGAGC |
| | IL2Ralpha - | AAGTCTTTCCAGCTGGAGGATGCTGAGAACTTTATCTCCAATATCCGGGTGACC |
| | mIgG1 Fc | GTGGTGAAGCTGAAGGGCAGCGACAACACATTCGAGTGCCAGTTTGACGATGAG |
| | | TCTGCCACCGTGGTGGATTTCCTGAGGCGGTGGATCGCTTTTTGTCAGAGCATC |
| | | ATCTCCACAAGCCCTCAGTCTGGAGGAGGTGGCAGCGGAGGAGGAGGTGGCCCA |
| | | CTGGGCGTGAGGGGTGGCGGCGGCGGCTCTGGCGGCGGCGGCTCCGAGCTGTGC |
| | | CTGTACGACCCCCCTGAGGTGCCCAATGCCACCTTCAAGGCTCTGTCTTATAAG |
| | | AACGGCACAATCCTGAATTGCGAGTGTAAGAGGGGCTTTAGACGCCTGAAGGAG |
| | | CTGGTGTACATGCGGTGTCTGGGCAACTCCTGGTCCAGCAATTGCCAGTGTACC |
| | | TCTAACTCCCATGACAAGAGCAGAAAGCAGGTGACAGCCCAGCTGGAGCACCAG |
| | | AAGGAGCAGCAGACCACAACCGATATGCAGAAGCCCACCCAGTCTATGCACCAG |
| | | GAGAATCTGACAGGCCATTGCAGAGAGCCACCCCCTTGGAAGCACGAGGATAGC |
| | | AAGCGCATCTATCATTTCGTGGAGGGCCAGTCTGTGCACTACGAGTGTATCCCC |
| | | GGCTATAAGGCCCTGCAGAGAGGCCCTGCTATCTCCATCTGCAAGATGAAGTGT |
| | | GGCAAGACCGGCTGGACACAGCCTCAGCTGACCTGCGTGGACGAGAGGGAGCAC |
| | | CATCGGTTCCTGGCTAGCGAGGAGTCTCAGGGCTCCCGCAACTCTTCCCCTGAG |
| | | AGCGAGACATCTTGTCCAATCACAACCACAGATTTTCCACAGCCCACCGAGACA |
| | | ACCGCTATGACAGAGACCTTCGTGCTGACTATGGAATACAAAGGATGCAAACCC |
| | | TGTATCTGTACCGTGCCCGAGGTCTCTTCCGTCTTTATTTTCCCCCCCAAGCCT |
| | | AAGGATGTGCTGACTATTACTCTGACCCCCAAGGTGACATGCGTGGTGGTGGAC |
| | | ATCAGCAAGGACGATCCTGAGGTGCAGTTCTCTTGGTTTGTGGACGATGTGGAG |
| | | GTGCACACCGCCCAGACACAGCCAAGGGAGGAGCAGTTCAATAGCACCTTTCGG |
| | | TCCGTGAGCGAGCTGCCCATCATGCATCAGGATTGGCTGAATGGCAAGGAGTTC |
| | | AAGTGCAGAGTGAACTCTGCCGCTTTTCCCGCTCCTATCGAGAAGACCATCTCC |
| | | AAGACAAAGGGCCGCCCAAAGGCTCCACAGGTGTACACCATCCCACCTCCAAAG |
| | | GAGCAGATGGCTAAGGACAAGGTGTCTCTGACCTGTATGATCACAGACTTCTTT |
| | | CCTGAGGACATCACAGTGGAGTGGCAGTGGAACGGCCAGCCTGCCGAGAACTAT |
| | | AAGAATACCCAGCCAATCATGGACACAGATGGCTCTTACTTCGTGTATTCCAAG |
| | | CTGAACGTGCAGAAGTCCAATTGGGAGGCTGGCAACACCTTTACATGTAGCGTG |
| | | CTGCACGAAGGTCTGCATAACCATCATACCGAAAAATCACTGTCACACTCCCCT |
| | | GGAAAATAATGA |
| 132 | Construct C | ATGGGTTGGTCCTGCATCATCCTGTTCCTGGTCGCCACCGCCACTGGGGTCCAC |
| | DNA | TCCGCACCTACATCATCATCAACTTCATCCTCCACCGCTGAGGCTCAGCAACAA |
| | sequence: m | CAGCAACAACAGCAGCAGCAGCAGCAGCATCTGGAGCAGCTGCTGATGGACCTG |
| | IL2(C140S)- | CAGGAGCTGCTGTCCAGAATGGAGAACTACCGCAATCTGAAGCTGCCAAGGATG |
| | 2x(SG4) - | CTGACCTTCAAGTTTTATCTGCCCAAGCAGGCCACAGAGCTGAAGGACCTGCAG |
| | MMPcs1 - | TGCCTGGAGGATGAGCTGGGCCCACTGAGGCACGTGCTGGACCTGACCCAGAGC |
| | 2x(G4S) - | AAGTCTTTCCAGCTGGAGGATGCTGAGAACTTTATCTCCAATATCCGGGTGACC |
| | IL2Ralpha | GTGGTGAAGCTGAAGGGCAGCGACAACACATTCGAGTGCCAGTTTGACGATGAG |
| | mIgG1 | TCTGCCACCGTGGTGGATTTCCTGAGGCGGTGGATCGCTTTTTCCCAGAGCATC |
| | Fc(T252M)- | ATCTCCACAAGCCCTCAGTCTGGAGGAGGTGGCAGCGGAGGAGGAGGTGGCCCA |
| | 6xHIS | CTGGGCGTGAGGGGTGGCGGCGGCGGCTCTGGCGGCGGCGGCTCCGAGCTGTGC |
| | | CTGTACGACCCCCCTGAGGTGCCCAATGCCACCTTCAAGGCTCTGTCTTATAAG |
| | | AACGGCACAATCCTGAATTGCGAGTGTAAGAGGGGCTTTAGACGCCTGAAGGAG |
| | | CTGGTGTACATGCGGTGTCTGGGCAACTCCTGGTCCAGCAATTGCCAGTGTACC |
| | | TCTAACTCCCATGACAAGAGCAGAAAGCAGGTGACAGCCCAGCTGGAGCACCAG |
| | | AAGGAGCAGCAGACCACAACCGATATGCAGAAGCCCACCCAGTCTATGCACCAG |
| | | GAGAATCTGACAGGCCATTGCAGAGAGCCACCCCCTTGGAAGCACGAGGATAGC |
| | | AAGCGCATCTATCATTTCGTGGAGGGCCAGTCTGTGCACTACGAGTGTATCCCC |
| | | GGCTATAAGGCCCTGCAGAGAGGCCCTGCTATCTCCATCTGCAAGATGAAGTGT |
| | | GGCAAGACCGGCTGGACACAGCCTCAGCTGACCTGCGTGGACGAGAGGGAGCAC |
| | | CATCGGTTCCTGGCTAGCGAGGAGTCTCAGGGCTCCCGCAACTCTTCCCCTGAG |
| | | AGCGAGACATCTTGTCCAATCACAACCACAGATTTTCCACAGCCCACCGAGACA |
| | | ACCGCTATGACAGAGACCTTCGTGCTGACTATGGAATACAAAGGATGCAAACCC |
| | | TGTATCTGTACCGTGCCCGAGGTCTCTTCCGTCTTTATTTTCCCCCCCAAGCCT |
| | | AAGGATGTGCTGATGATTACTCTGACCCCCAAGGTGACATGCGTGGTGGTGGAC |
| | | ATCAGCAAGGACGATCCTGAGGTGCAGTTCTCTTGGTTTGTGGACGATGTGGAG |
| | | GTGCACACCGCCCAGACACAGCCAAGGGAGGAGCAGTTCAATAGCACCTTTCGG |
| | | TCCGTGAGCGAGCTGCCCATCATGCATCAGGATTGGCTGAATGGCAAGGAGTTC |
| | | AAGTGCAGAGTGAACTCTGCCGCTTTTCCCGCTCCTATCGAGAAGACCATCTCC |
| | | AAGACAAAGGGCCGCCCAAAGGCTCCACAGGTGTACACCATCCCACCTCCAAAG |
| | | GAGCAGATGGCTAAGGACAAGGTGTCTCTGACCTGTATGATCACAGACTTCTTT |
| | | CCTGAGGACATCACAGTGGAGTGGCAGTGGAACGGCCAGCCTGCCGAGAACTAT |
| | | AAGAATACCCAGCCAATCATGGACACAGATGGCTCTTACTTCGTGTATTCCAAG |
| | | CTGAACGTGCAGAAGTCCAATTGGGAGGCTGGCAACACCTTTACATGTAGCGTG |
| | | CTGCACGAAGGTCTGCATAACCATCATACCGAAAAATCACTGTCACACTCCCCT |
| | | GGACACCACCACCACCACCACTAATGA |
| 133 | Construct R | ATGGGTTGGTCCTGCATCATCCTGTTCCTGGTCGCCACCGCCACTGGGGTCCAC |
| | DNA | TCCGCACCTACATCATCATCAACTTCATCCTCCACCGCTGAGGCTCAGCAACAA |
| | sequence: | CAGCAACAACAGCAGCAGCAGCAGCAGCATCTGGAGCAGCTGCTGATGGACCTG |
| | mIL2(C140S)- | CAGGAGCTGCTGTCCAGAATGGAGAACTACCGCAATCTGAAGCTGCCAAGGATG |
| | 2x(SG4) - | CTGACCTTCAAGTTTTATCTGCCCAAGCAGGCCACAGAGCTGAAGGACCTGCAG |
| | MMPcs1 | TGCCTGGAGGATGAGCTGGGCCCACTGAGGCACGTGCTGGACCTGACCCAGAGC |
| | 2x(G4S) - | AAGTCTTTCCAGCTGGAGGATGCTGAGAACTTTATCTCCAATATCCGGGTGACC |
| | IL2Ralpha | GTGGTGAAGCTGAAGGGCAGCGACAACACATTCGAGTGCCAGTTTGACGATGAG |
| | hu IgG1 Fc- | TCTGCCACCGTGGTGGATTTCCTGAGGCGGTGGATCGCTTTTTCCCAGAGCATC |
| | 6xHIS | ATCTCCACAAGCCCTCAGTCTGGAGGAGGTGGCAGCGGAGGAGGAGGTGGCCCA |
| | | CTGTACGACCCCCCTGAGGTGCCCAATGCCACCTTCAAGGCTCTGTCTTATAAG |
| | | CTGGGCGTGAGGGGTGGCGGCGGCGGCTCTGGCGGGGGGGGCTCCGAGCTGTGC |
| | | AACGGCACAATCCTGAATTGCGAGTGTAAGAGGGGCTTTAGACGCCTGAAGGAG |
| | | CTGGTGTACATGCGGTGTCTGGGCAACTCCTGGTCCAGCAATTGCCAGTGTACC |
| | | TCTAACTCCCATGACAAGAGCAGAAAGCAGGTGACAGCCCAGCTGGAGCACCAG |
| | | AAGGAGCAGCAGACCACAACCGATATGCAGAAGCCCACCCAGTCTATGCACCAG |
| | | GAGAATCTGACAGGCCATTGCAGAGAGCCACCCCCTTGGAAGCACGAGGATAGC |
| | | AAGCGCATCTATCATTTCGTGGAGGGCCAGTCTGTGCACTACGAGTGTATCCCC |
| | | GGCTATAAGGCCCTGCAGAGAGGCCCTGCTATCTCCATCTGCAAGATGAAGTGT |
| | | GGCAAGACCGGCTGGACACAGCCTCAGCTGACCTGCGTGGACGAGAGGGAGCAC |
| | | CATCGGTTCCTGGCTAGCGAGGAGTCTCAGGGCTCCCGCAACTCTTCCCCTGAG |
| | | AGCGAGACATCTTGTCCAATCACAACCACAGATTTTCCACAGCCCACCGAGACA |
| | | ACCGCTATGACAGAGACCTTCGTGCTGACTATGGAATACAAAGATAAGACTCAT |
| | | ACCTGTCCACCCTGTCCTGCTCCTGAACTGCTGGGCGGTCCTTCCGTGTTCCTG |
| | | TTCCCTCCAAAACCTAAAGATACCCTGATGATCTCCAGGACCCCTGAGGTGACA |
| | | TGCGTGGTGGTGGACGTGAGCCACGAGGACCCCGAGGTGAAGTTCAACTGGTAC |
| | | GTGGACGGCGTGGAGGTGCATAATGCCAAGACAAAGCCCAGGGAGGAGCAGTAC |
| | | AACAGCACCTATCGGGTGGTGTCTGTGCTGACAGTGCTGCACCAGGATTGGCTG |
| | | AACGGCAAGGAGTATAAGTGCAAGGTGTCTAATAAGGCCCTGCCTGCTCCAATC |
| | | GAGAAGACCATCTCCAAGGCCAAGGGCCAGCCCAGAGAGCCTCAGGTGTACACA |
| | | CTGCCCCCTAGCCGCGACGAGCTGACCAAGAACCAGGTGTCTCTGACATGTCTG |
| | | GTGAAGGGCTTCTATCCATCTGACATCGCTGTGGAGTGGGAGTCCAATGGCCAG |
| | | CCCGAGAACAATTACAAGACCACACCACCCGTGCTGGACTCTGATGGCTCCTTC |
| | | TTTCTGTATTCCAAGCTGACCGTGGACAAGAGCAGATGGCAGCAGGGCAACGTG |
| | | TTCTCCTGTAGCGTGATGCACGAAGCCCTGCACAACCATTACACTCAGAAAAGC |
| | | CTGTCCCTGTCCCCTGGGCACCACCACCACCACCACTAATGA |
| 134 | Construct D | ATGGGTTGGTCCTGCATCATCCTGTTCCTGGTCGCCACCGCCACTGGGGTCCAC |
| | DNA | TCCGCACCTACATCATCATCAACTTCATCCTCCACCGCTGAGGCTCAGCAACAA |
| | Sequence: | CAGCAACAACAGCAGCAGCAGCAGCAGCATCTGGAGCAGCTGCTGATGGACCTG |
| | mIL2(C140S)- | CAGGAGCTGCTGTCCAGAATGGAGAACTACCGCAATCTGAAGCTGCCAAGGATG |
| | 2x(SG4) - | CTGACCTTCAAGTTTTATCTGCCCAAGCAGGCCACAGAGCTGAAGGACCTGCAG |
| | MMPcs1 - | TGCCTGGAGGATGAGCTGGGCCCACTGAGGCACGTGCTGGACCTGACCCAGAGC |
| | 2x(G4S) - | AAGTCTTTCCAGCTGGAGGATGCTGAGAACTTTATCTCCAATATCCGGGTGACC |
| | SIL2Ralpha | GTGGTGAAGCTGAAGGGCAGCGACAACACATTCGAGTGCCAGTTTGACGATGAG |
| | mIgG1 | TCTGCCACCGTGGTGGATTTCCTGAGGCGGTGGATCGCTTTTTCCCAGAGCATC |
| | Fc(T252M)- | ATCTCCACAAGCCCTCAGTCTGGAGGAGGTGGCAGCGGAGGAGGAGGTGGCCCA |
| | 6xHIS | CTGGGCGTGAGGGGTGGGGGGGGCGGCTCTGGCGGCGGCGGCTCCGAGCTGTGC |
| | | CTGTACGACCCCCCTGAGGTGCCCAATGCCACCTTCAAGGCTCTGTCTTATAAG |
| | | AACGGCACAATCCTGAATTGCGAGTGTAAGAGGGGCTTTAGACGCCTGAAGGAG |
| | | CTGGTGTACATGCGGTGTCTGGGCAACTCCTGGTCCAGCAATTGCCAGTGTACC |
| | | TCTAACTCCCATGACAAGAGCAGAAAGCAGGTGACAGCCCAGCTGGAGCACCAG |
| | | AAGGAGCAGCAGACCACAACCGATATGCAGAAGCCCACCCAGTCTATGCACCAG |
| | | GAGAATCTGACAGGCCATTGCAGAGAGCCACCCCCTTGGAAGCACGAGGATAGC |
| | | AAGCGCATCTATCATTTCGTGGAGGGCCAGTCTGTGCACTACGAGTGTATCCCC |
| | | GGCTATAAGGCCCTGCAGAGAGGCCCTGCTATCTCCATCTGCAAGATGAAGTGT |
| | | GGCAAGACCGGCTGGACACAGCCTCAGCTGACCTGCGTGGACGAGAGGGAGCAC |
| | | CATCGGTTCCTGGCTAGCGAGGAGTCTGGATGCAAACCCTGTATCTGTACCGTG |
| | | CCCGAGGTCTCTTCCGTCTTTATTTTCCCCCCCAAGCCTAAGGATGTGCTGATG |
| | | ATTACTCTGACCCCCAAGGTGACATGCGTGGTGGTGGACATCAGCAAGGACGAT |
| | | CCTGAGGTGCAGTTCTCTTGGTTTGTGGACGATGTGGAGGTGCACACCGCCCAG |
| | | ACACAGCCAAGGGAGGAGCAGTTCAATAGCACCTTTCGGTCCGTGAGCGAGCTG |
| | | CCCATCATGCATCAGGATTGGCTGAATGGCAAGGAGTTCAAGTGCAGAGTGAAC |
| | | TCTGCCGCTTTTCCCGCTCCTATCGAGAAGACCATCTCCAAGACAAAGGGCCGC |
| | | CCAAAGGCTCCACAGGTGTACACCATCCCACCTCCAAAGGAGCAGATGGCTAAG |
| | | GACAAGGTGTCTCTGACCTGTATGATCACAGACTTCTTTCCTGAGGACATCACA |
| | | GTGGAGTGGCAGTGGAACGGCCAGCCTGCCGAGAACTATAAGAATACCCAGCCA |
| | | ATCATGGACACAGATGGCTCTTACTTCGTGTATTCCAAGCTGAACGTGCAGAAG |
| | | TCCAATTGGGAGGCTGGCAACACCTTTACATGTAGCGTGCTGCACGAAGGTCTG |
| | | CATAACCATCATACCGAAAAATCACTGTCACACTCCCCTGGACACCACCACCAC |
| | | CACCACTAATGA |
| 135 | Construct E | ATGGGCTGGTCCTGCATCATTCTGTTTCTGGTGGCTACCGCCACCGGCGTGCAC |
| | DNA | TCTGCTCCTACATCCTCCAGCACCAAGAAAACCCAGCTGCAGTTGGAGCATCTG |
| | sequence: | CTGCTGGACCTGCAGATGATCCTGAACGGCATCAACAACTACAAGAACCCCAAG |
| | HuIL2(C125S) - | CTGACCCGGATGCTGACCTTCAAGTTCTACATGCCCAAGAAGGCCACCGAGCTG |
| | 2x(SG4) - | AAACATCTGCAGTGCCTGGAAGAGGAACTGAAGCCCCTGGAAGAAGTGCTGAAT |
| | MMPcs1 - | CTGGCCCAGTCCAAGAACTTCCACCTGAGGCCTCGGGACCTGATCTCCAACATC |
| | 2x(G4S) - | AACGTGATCGTGCTCGAGCTGAAGGGCTCCGAGACAACCTTCATGTGCGAGTAC |
| | IL2Ralpha | GCCGACGAGACAGCTACCATCGTGGAATTTCTGAACCGGTGGATCACCTTCAGC |
| | hu IgG1 Fc - | CAGTCCATCATCAGCACCCTGACATCTGGCGGCGGAGGATCTGGCGGAGGCGGA |
| | 6xHIS | GGACCTTTGGGAGTTCGCGGCGGTGGTGGTGGCAGCGGAGGTGGTGGATCTGAG |
| | | CTGTGTGACGACGACCCTCCTGAGATCCCTCACGCCACCTTTAAGGCCATGGCT |
| | | TACAAAGAGGGCACCATGCTGAACTGCGAGTGCAAGAGAGGCTTCCGGCGGATC |
| | | AAGTCCGGCAGCCTGTATATGCTGTGCACCGGCAACTCCAGCCACTCCTCTTGG |
| | | GACAACCAGTGCCAGTGCACCAGCTCTGCTACCCGGAACACCACCAAGCAAGTG |
| | | ACCCCTCAGCCTGAGGAACAGAAAGAGCGCAAGACCACCGAGATGCAGAGCCCC |
| | | ATGCAGCCTGTGGATCAGGCTTCTCTGCCTGGCCACTGTAGAGAGCCTCCACCT |
| | | TGGGAGAATGAGGCTACCGAGAGAATCTACCACTTCGTCGTGGGACAGATGGTG |
| | | TACTACCAGTGCGTGCAGGGCTACCGCGCTCTGCATAGAGGACCAGCAGAGTCC |
| | | GTGTGCAAGATGACCCACGGCAAGACCAGATGGACCCAGCCTCAGCTGATCTGC |
| | | ACCGGCGAGATGGAAACCTCTCAGTTCCCCGGCGAGGAAAAGCCTCAGGCCTCT |
| | | CCTGAAGGCAGACCCGAGTCTGAGACATCCTGTCTCGTGACCACCACAGACTTC |
| | | CAGATCCAGACCGAGATGGCCGCTACCATGGAAACCAGCATCTTCACCACCGAG |
| | | TACCAGGACAAGACCCACACCTGTCCTCCATGTCCTGCTCCAGAATTGCTCGGC |
| | | GGACCCTCCGTGTTCCTGTTTCCTCCAAAGCCTAAGGACACCCTGATGATCTCT |
| | | CGGACCCCTGAAGTGACCTGCGTGGTGGTCGATGTGTCTCACGAGGATCCCGAA |
| | | GTGAAGTTCAATTGGTACGTGGACGGCGTGGAAGTGCACAACGCCAAGACCAAG |
| | | CCTAGAGAGGAACAGTACAACTCCACCTACAGAGTGGTGTCCGTGCTGACCGTG |
| | | CTGCACCAGGATTGGCTGAATGGCAAAGAGTACAAGTGCAAGGTGTCCAACAAG |
| | | GCCCTGCCTGCTCCTATCGAAAAGACCATCTCCAAGGCCAAGGGCCAGCCTAGG |
| | | GAACCCCAGGTTTACACCTTGCCTCCATCTCGGGACGAGCTGACCAAGAACCAG |
| | | GTGTCCCTGACCTGTCTGGTCAAGGGCTTCTACCCCTCCGATATCGCCGTGGAA |
| | | TGGGAGTCTAATGGCCAGCCTGAAAACAATTACAAGACAACCCCTCCTGTGCTG |
| | | GACTCCGACGGCTCATTCTTCCTGTACAGCAAGCTGACAGTGGACAAGTCCAGA |
| | | TGGCAGCAGGGCAACGTGTTCTCCTGCTCCGTGATGCATGAGGCCCTGCACAAC |
| | | CACTACACCCAGAAGTCCCTGTCTCTGTCCCCTGGCCACCATCACCATCATCAC |
| | | TGATAA |
| 136 | Construct S | ATGGGTTGGTCCTGCATCATCCTGTTCCTGGTCGCCACCGCCACTGGGGTCCAC |
| | DNA | TCCGCACCTACTTCAAGTTCTACAAAGAAAACACAGCTACAACTGGAGCATTTA |
| | sequence: | CTTCTGGATTTACAGATGATTTTGAATGGAATTAATAATTACAAGAATCCCAAA |
| | hIL2- 2x(SG4) - | CTCACCAGGATGCTCACATTTAAGTTTTACATGCCCAAGAAGGCCACAGAACTG |
| | MMPcs1 - | AAACATCTTCAGTGTCTAGAAGAAGAACTCAAACCTCTGGAGGAAGTGCTAAAT |
| | 2x(G4S) - | TTAGCTCAAAGCAAAAACTTTCACTTAAGACCCAGGGACTTAATCAGCAATATC |
| | hIL2Ralpha - | AACGTAATAGTTCTGGAACTAAAGGGATCTGAAACAACATTCATGTGTGAATAT |
| | hIgG1Fc_mut | GCTGATGAGACAGCAACCATTGTAGAATTTCTGAACAGATGGATTACCTTTTGT |
| | 1 (K392D; | CAAAGCATCATCTCAACACTGACTTCTGGTGGCGGTGGCTCTGGTGGCGGTGGC |
| | K409D) | GGTCCTCTGGGTGTCAGAGGTGGTGGCGGTGGCTCTGGTGGCGGTGGCTCTGAG |
| | | CTCTGTGACGATGACCCGCCAGAGATCCCACACGCCACATTCAAAGCCATGGCC |
| | | TACAAGGAAGGAACCATGTTGAACTGTGAATGCAAGAGAGGTTTCCGCAGAATA |
| | | AAAAGCGGGTCACTCTATATGCTCTGTACAGGAAACTCTAGCCACTCGTCCTGG |
| | | GACAACCAATGTCAATGCACAAGCTCTGCCACTCGGAACACAACGAAACAAGTG |
| | | ACACCTCAACCTGAAGAACAGAAAGAAAGGAAAACCACAGAAATGCAAAGTCCA |
| | | ATGCAGCCAGTGGACCAAGCGAGCCTTCCAGGTCACTGCAGGGAACCTCCACCA |
| | | TGGGAAAATGAAGCCACAGAGAGAATTTATCATTTCGTGGTGGGGCAGATGGTT |
| | | TATTATCAGTGCGTCCAGGGATACAGGGCTCTACACAGAGGTCCTGCTGAGAGC |
| | | GTCTGCAAAATGACCCACGGGAAGACAAGGTGGACCCAGCCCCAGCTCATATGC |
| | | ACAGGTGAAATGGAGACCAGTCAGTTTCCAGGTGAAGAGAAGCCTCAGGCAAGC |
| | | CCCGAAGGCCGTCCTGAGAGTGAGACTTCCTGCCTCGTCACAACAACAGATTTT |
| | | CAAATACAGACAGAAATGGCTGCAACCATGGAGACGTCCATATTTACAACAGAG |
| | | TACCAGGACAAAACTCACACATGCCCACCGTGCCCAGCACCTGAACTCCTGGGG |
| | | GGACCGTCAGTCTTCCTCTTCCCCCCAAAACCCAAGGACACCCTCATGATCTCC |
| | | CGGACCCCTGAGGTCACATGCGTGGTGGTGGACGTGAGCCACGAAGACCCTGAG |
| | | GTCAAGTTCAACTGGTACGTGGACGGCGTGGAGGTGCATAATGCCAAGACAAAG |
| | | CCGCGGGAGGAGCAGTACAACAGCACGTACCGTGTGGTCAGCGTCCTCACCGTC |
| | | CTGCACCAGGACTGGCTGAATGGCAAGGAGTACAAGTGCAAGGTCTCCAACAAA |
| | | GCCCTCCCAGCCCCCATCGAGAAAACCATCTCCAAAGCCAAAGGGCAGCCCCGA |
| | | GAACCACAGGTGTACACCCTGCCCCCATCCCGGGATGAGCTGACCAAGAACCAG |
| | | GTCAGCCTGACCTGCCTGGTCAAAGGCTTCTATCCCAGCGACATCGCCGTGGAG |
| | | TGGGAGAGCAATGGGCAGCCGGAGAACAACTACGACACCACGCCTCCCGTGCTG |
| | | GACTCCGACGGCTCCTTCTTCCTCTATAGCGACCTCACCGTGGACAAGAGCAGG |
| | | TGGCAGCAGGGGAACGTCTTCTCATGCTCCGTGATGCATGAGGCTCTGCACAAC |
| | | CACTACACGCAGAAGAGCCTCTCCCTGTCTCCGGGTCACCACCACCACCACCAC |
| | | TAATGA |
| 137 | Construct T | ATGGGTTGGTCCTGCATCATCCTGTTCCTGGTCGCCACCGCCACTGGGGTCCAC |
| | DNA sequence | TCCGACAAAACTCACACATGCCCACCGTGCCCAGCACCTGAACTCCTGGGGGGA |
| | including | CCGTCAGTCTTCCTCTTCCCCCCAAAACCCAAGGACACCCTCATGATCTCCCGG |
| | hIgG1 Fc_mut | ACCCCTGAGGTCACATGCGTGGTGGTGGACGTGAGCCACGAAGACCCTGAGGTC |
| | 2 (D356K; | AAGTTCAACTGGTACGTGGACGGCGTGGAGGTGCATAATGCCAAGACAAAGCCG |
| | D399K) | CGGGAGGAGCAGTACAACAGCACGTACCGTGTGGTCAGCGTCCTCACCGTCCTG |
| | | CACCAGGACTGGCTGAATGGCAAGGAGTACAAGTGCAAGGTCTCCAACAAAGCC |
| | | CTCCCAGCCCCCATCGAGAAAACCATCTCCAAAGCCAAAGGGCAGCCCCGAGAA |
| | | CCACAGGTGTACACCCTGCCCCCATCCCGGAAAGAGCTGACCAAGAACCAGGTC |
| | | AGCCTGACCTGCCTGGTCAAAGGCTTCTATCCCAGCGACATCGCCGTGGAGTGG |
| | | GAGAGCAATGGGCAGCCGGAGAACAACTACAAGACCACGCCTCCCGTGCTGAAA |
| | | TCCGACGGCTCCTTCTTCCTCTATAGCAAGCTCACCGTGGACAAGAGCAGGTGG |
| | | CAGCAGGGGAACGTCTTCTCATGCTCCGTGATGCATGAGGCTCTGCACAACCAC |
| | | TACACGCAGAAGAGCCTCTCCCTGTCTCCGGGTCACCACCACCACCACCACTAA |
| | | TGA |
| 138 | mIgG1 Fc - | ATGGGTTGGTCCTGCATCATCCTGTTCCTGGTCGCCACCGCCACTGGGGTCCAC |
| | Murine IL2 - | TCCGGATGCAAACCCTGTATCTGTACCGTGCCCGAGGTCTCTTCCGTCTTTATT |
| | 2x(SG4) - | TTCCCCCCCAAGCCTAAGGATGTGCTGACTATTACTCTGACCCCCAAGGTGACA |
| | MMPcs1 - 2x | TGCGTGGTGGTGGACATCAGCAAGGACGATCCTGAGGTGCAGTTCTCTTGGTTT |
| | (G4S) - | GTGGACGATGTGGAGGTGCACACCGCCCAGACACAGCCAAGGGAGGAGCAGTTC |
| | IL2Ralpha | AATAGCACCTTTCGGTCCGTGAGCGAGCTGCCCATCATGCATCAGGATTGGCTG |
| | (long kinetic | AATGGCAAGGAGTTCAAGTGCAGAGTGAACTCTGCCGCTTTTCCCGCTCCTATC |
| | IL2 post | GAGAAGACCATCTCCAAGACAAAGGGCCGCCCAAAGGCTCCACAGGTGTACACC |
| | cleavage) | ATCCCACCTCCAAAGGAGCAGATGGCTAAGGACAAGGTGTCTCTGACCTGTATG |
| | DNA | ATCACAGACTTCTTTCCTGAGGACATCACAGTGGAGTGGCAGTGGAACGGCCAG |
| | Sequence | CCTGCCGAGAACTATAAGAATACCCAGCCAATCATGGACACAGATGGCTCTTAC |
| | | TTCGTGTATTCCAAGCTGAACGTGCAGAAGTCCAATTGGGAGGCTGGCAACACC |
| | | TTTACATGTAGCGTGCTGCACGAAGGTCTGCATAACCATCATACCGAAAAATCA |
| | | CTGTCACACTCCCCTGGAAAAGCACCTACATCATCATCAACTTCATCCTCCACC |
| | | GCTGAGGCTCAGCAACAACAGCAACAACAGCAGCAGCAGCAGCAGCATCTGGAG |
| | | CAGCTGCTGATGGACCTGCAGGAGCTGCTGTCCAGAATGGAGAACTACCGCAAT |
| | | CTGAAGCTGCCAAGGATGCTGACCTTCAAGTTTTATCTGCCCAAGCAGGCCACA |
| | | GAGCTGAAGGACCTGCAGTGCCTGGAGGATGAGCTGGGCCCACTGAGGCACGTG |
| | | CTGGACCTGACCCAGAGCAAGTCTTTCCAGCTGGAGGATGCTGAGAACTTTATC |
| | | TCCAATATCCGGGTGACCGTGGTGAAGCTGAAGGGCAGCGACAACACATTCGAG |
| | | TGCCAGTTTGACGATGAGTCTGCCACCGTGGTGGATTTCCTGAGGCGGTGGATC |
| | | GCTTTTTGTCAGAGCATCATCTCCACAAGCCCTCAGTCTGGAGGAGGTGGCAGC |
| | | GGAGGAGGAGGTGGCCCACTGGGCGTGAGGGGTGGCGGCGGCGGCTCTGGCGGC |
| | | GGCGGCTCCGAGCTGTGCCTGTACGACCCCCCTGAGGTGCCCAATGCCACCTTC |
| | | AAGGCTCTGTCTTATAAGAACGGCACAATCCTGAATTGCGAGTGTAAGAGGGGC |
| | | TTTAGACGCCTGAAGGAGCTGGTGTACATGCGGTGTCTGGGCAACTCCTGGTCC |
| | | AGCAATTGCCAGTGTACCTCTAACTCCCATGACAAGAGCAGAAAGCAGGTGACA |
| | | GCCCAGCTGGAGCACCAGAAGGAGCAGCAGACCACAACCGATATGCAGAAGCCC |
| | | ACCCAGTCTATGCACCAGGAGAATCTGACAGGCCATTGCAGAGAGCCACCCCCT |
| | | TGGAAGCACGAGGATAGCAAGCGCATCTATCATTTCGTGGAGGGCCAGTCTGTG |
| | | CACTACGAGTGTATCCCCGGCTATAAGGCCCTGCAGAGAGGCCCTGCTATCTCC |
| | | ATCTGCAAGATGAAGTGTGGCAAGACCGGCTGGACACAGCCTCAGCTGACCTGC |
| | | GTGGACGAGAGGGAGCACCATCGGTTCCTGGCTAGCGAGGAGTCTCAGGGCTCC |
| | | CGCAACTCTTCCCCTGAGAGCGAGACATCTTGTCCAATCACAACCACAGATTTT |
| | | CCACAGCCCACCGAGACAACCGCTATGACAGAGACCTTCGTGCTGACTATGGAA |
| | | TACAAATAATGA |
| 139 | hIL2- 2x(SG4) - | ATGGGTTGGTCCTGCATCATCCTGTTCCTGGTCGCCACCGCCACTGGGGTCCAC |
| | MMPcs1 - | TCCgcacctacttcaagttctacaaagaaaacacagctacaactggagcattta |
| | 2x(G4S) - | cttctggatttacagatgattttgaatggaattaataattacaagaatcccaaa |
| | hIL2Rbeta - | ctcaccaggatgctcacatttaagttttacatgcccaagaaggccacagaactg |
| | hIgG1Fc | aaacatcttcagtgtctagaagaagaactcaaacctctggaggaagtgctaaat |
| | (Construct U) | ttagctcaaagcaaaaactttcacttaagacccagggacttaatcagcaatatc |
| | DNA | aacgtaatagttctggaactaaagggatctgaaacaacattcatgtgtgaatat |
| | Sequence | gctgatgagacagcaaccattgtagaatttctgaacagatggattaccttttgt |
| | | caaagcatcatctcaacactgactTCTGGTGGCGGTGGCTCTGGTGGCGGTGGC |
| | | GGTCCTCTGGGTGTCAGAGGTGGTGGCGGTGGCTCTGGTGGCGGTGGCTCTGCG |
| | | GTGAATGGCACTTCCCAGTTCACATGCTTCTACAACTCGAGAGCCAACATCTCC |
| | | TGTGTCTGGAGCCAAGATGGGGCTCTGCAGGACACTTCCTGCCAAGTCCATGCC |
| | | TGGCCGGACAGACGGCGGTGGAACCAAACCTGTGAGCTGCTCCCCGTGAGTCAA |
| | | GCATCCTGGGCCTGCAACCTGATCCTCGGAGCCCCAGATTCTCAGAAACTGACC |
| | | ACAGTTGACATCGTCACCCTGAGGGTGCTGTGCCGTGAGGGGGTGCGATGGAGG |
| | | GTGATGGCCATCCAGGACTTCAAGCCCTTTGAGAACCTTCGCCTGATGGCCCCC |
| | | ATCTCCCTCCAAGTTGTCCACGTGGAGACCCACAGATGCAACATAAGCTGGGAA |
| | | ATCTCCCAAGCCTCCCACTACTTTGAAAGACACCTGGAGTTCGAGGCCCGGACG |
| | | CTGTCCCCAGGCCACACCTGGGAGGAGGCCCCCCTGCTGACTCTCAAGCAGAAG |
| | | CAGGAATGGATCTGCCTGGAGACGCTCACCCCAGACACCCAGTATGAGTTTCAG |
| | | GTGCGGGTCAAGCCTCTGCAAGGCGAGTTCACGACCTGGAGCCCCTGGAGCCAG |
| | | CCCCTGGCCTTCAGGACAAAGCCTGCAGCCCTTGGGAAGGACACCGACAAGACC |
| | | CACACCTGTCCTCCATGTCCTGCTCCAGAATTGCTCGGCGGACCCTCCGTGTTC |
| | | CTGTTTCCTCCAAAGCCTAAGGACACCCTGATGATCTCTCGGACCCCTGAAGTG |
| | | ACCTGCGTGGTGGTCGATGTGTCTCACGAGGATCCCGAAGTGAAGTTCAATTGG |
| | | TACGTGGACGGCGTGGAAGTGCACAACGCCAAGACCAAGCCTAGAGAGGAACAG |
| | | TACAACTCCACCTACAGAGTGGTGTCCGTGCTGACCGTGCTGCACCAGGATTGG |
| | | CTGAATGGCAAAGAGTACAAGTGCAAGGTGTCCAACAAGGCCCTGCCTGCTCCT |
| | | ATCGAAAAGACCATCTCCAAGGCCAAGGGCCAGCCTAGGGAACCCCAGGTTTAC |
| | | ACCTTGCCTCCATCTCGGGACGAGCTGACCAAGAACCAGGTGTCCCTGACCTGT |
| | | CTGGTCAAGGGCTTCTACCCCTCCGATATCGCCGTGGAATGGGAGTCTAATGGC |
| | | CAGCCTGAAAACAATTACAAGACAACCCCTCCTGTGCTGGACTCCGACGGCTCA |
| | | TTCTTCCTGTACAGCAAGCTGACAGTGGACAAGTCCAGATGGCAGCAGGGCAAC |
| | | GTGTTCTCCTGCTCCGTGATGCATGAGGCCCTGCACAACCACTACACCCAGAAG |
| | | TCCCTGTCTCTGTCCCCTGGCTAATGA |
| 140 | hIL2- 2x(SG4) - | ATGGGTTGGTCCTGCATCATCCTGTTCCTGGTCGCCACCGCCACTGGGGTCCAC |
| | MMPcs1 - | TCCgcacctacttcaagttctacaaagaaaacacagctacaactggagcattta |
| | 2x(G4S) - | cttctggatttacagatgattttgaatggaattaataattacaagaatcccaaa |
| | hIL2Rgamma - | ctcaccaggatgctcacatttaagttttacatgcccaagaaggccacagaactg |
| | hIgG1Fc | aaacatcttcagtgtctagaagaagaactcaaacctctggaggaagtgctaaat |
| | DNA sequence | ttagctcaaagcaaaaactttcacttaagacccagggacttaatcagcaatatc |
| | | aacgtaatagttctggaactaaagggatctgaaacaacattcatgtgtgaatat |
| | | gctgatgagacagcaaccattgtagaatttctgaacagatggattaccttttgt |
| | | caaagcatcatctcaacactgactTCTGGTGGCGGTGGCTCTGGTGGCGGTGGC |
| | | GGTCCTCTGGGTGTCAGAGGTGGTGGCGGTGGCTCTGGTGGCGGTGGCTCTCTG |
| | | AACACGACAATTCTGACGCCCAATGGGAATGAAGACACCACAGCTGATTTCTTC |
| | | CTGACCACTATGCCCACTGACTCCCTCAGTGTTTCCACTCTGCCCCTCCCAGAG |
| | | GTTCAGTGTTTTGTGTTCAATGTCGAGTACATGAATTGCACTTGGAACAGCAGC |
| | | TCTGAGCCCCAGCCTACCAACCTCACTCTGCATTATTGGTACAAGAACTCGGAT |
| | | AATGATAAAGTCCAGAAGTGCAGCCACTATCTATTCTCTGAAGAAATCACTTCT |
| | | GGCTGTCAGTTGCAAAAAAAGGAGATCCACCTCTACCAAACATTTGTTGTTCAG |
| | | CTCCAGGACCCACGGGAACCCAGGAGACAGGCCACACAGATGCTAAAACTGCAG |
| | | AATCTGGTGATCCCCTGGGCTCCAGAGAACCTAACACTTCACAAACTGAGTGAA |
| | | TCCCAGCTAGAACTGAACTGGAACAACAGATTCTTGAACCACTGTTTGGAGCAC |
| | | TTGGTGCAGTACCGGACTGACTGGGACCACAGCTGGACTGAACAATCAGTGGAT |
| | | TATAGACATAAGTTCTCCTTGCCTAGTGTGGATGGGCAGAAACGCTACACGTTT |
| | | CGTGTTCGGAGCCGCTTTAACCCACTCTGTGGAAGTGCTCAGCATTGGAGTGAA |
| | | TGGAGCCACCCAATCCACTGGGGGAGCAATACTTCAAAAGAGAATCCTTTCCTG |
| | | TTTGCATTGGAAGCCGACAAGACCCACACCTGTCCTCCATGTCCTGCTCCAGAA |
| | | TTGCTCGGCGGACCCTCCGTGTTCCTGTTTCCTCCAAAGCCTAAGGACACCCTG |
| | | ATGATCTCTCGGACCCCTGAAGTGACCTGCGTGGTGGTCGATGTGTCTCACGAG |
| | | GATCCCGAAGTGAAGTTCAATTGGTACGTGGACGGCGTGGAAGTGCACAACGCC |
| | | AAGACCAAGCCTAGAGAGGAACAGTACAACTCCACCTACAGAGTGGTGTCCGTG |
| | | CTGACCGTGCTGCACCAGGATTGGCTGAATGGCAAAGAGTACAAGTGCAAGGTG |
| | | TCCAACAAGGCCCTGCCTGCTCCTATCGAAAAGACCATCTCCAAGGCCAAGGGC |
| | | CAGCCTAGGGAACCCCAGGTTTACACCTTGCCTCCATCTCGGGACGAGCTGACC |
| | | AAGAACCAGGTGTCCCTGACCTGTCTGGTCAAGGGCTTCTACCCCTCCGATATC |
| | | GCCGTGGAATGGGAGTCTAATGGCCAGCCTGAAAACAATTACAAGACAACCCCT |
| | | CCTGTGCTGGACTCCGACGGCTCATTCTTCCTGTACAGCAAGCTGACAGTGGAC |
| | | AAGTCCAGATGGCAGCAGGGCAACGTGTTCTCCTGCTCCGTGATGCATGAGGCC |
| | | CTGCACAACCACTACACCCAGAAGTCCCTGTCTCTGTCCCCTGGCTAATGA |
| 141- | Not Used | |
| 149 | | |

Other DNA sequences

| | | |
|---|---|---|
| 150 | Murine Ig | ATGGGTTGGTCCTGCATCATCCTGTTCCTGGTCGCCACCGCCACTGGGGTCCAC |
| | kappa chain | TCC |
| | leader DNA | |
| | sequence | |
| 151 | Murine IL-2 | GCACCTACATCATCATCAACTTCATCCTCCACCGCTGAGGCTCAGCAACAACAG |
| | DNA sequence | CAACAACAGCAGCAGCAGCAGCAGCATCTGGAGCAGCTGCTGATGGACCTGCAG |
| | | GAGCTGCTGTCCAGAATGGAGAACTACCGCAATCTGAAGCTGCCAAGGATGCTG |
| | | ACCTTCAAGTTTTATCTGCCCAAGCAGGCCACAGAGCTGAAGGACCTGCAGTGC |
| | | CTGGAGGATGAGCTGGGCCCACTGAGGCACGTGCTGGACCTGACCCAGAGCAAG |
| | | TCTTTCCAGCTGGAGGATGCTGAGAACTTTATCTCCAATATCCGGGTGACCGTG |
| | | GTGAAGCTGAAGGGCAGCGACAACACATTCGAGTGCCAGTTTGACGATGAGTCT |
| | | GCCACCGTGGTGGATTTCCTGAGGCGGTGGATCGCTTTTTGTCAGAGCATCATC |
| | | TCCACAAGCCCTCAG |
| 152 | MMP cleavage | GGCCCACTGGGCGTGAGGGGT |
| | site | |
| | GPLGVRG | |
| | DNA sequence | |
| 153 | Gly-Ser rich | TCTGGAGGAGGTGGCAGCGGAGGAGGAGGT |
| | linker DNA | |
| | sequence | |
| 154 | Murine IL- | GAGCTGTGCCTGTACGACCCCCCTGAGGTGCCCAATGCCACCTTCAAGGCTCTG |
| | 2Ralpha DNA | TCTTATAAGAACGGCACAATCCTGAATTGCGAGTGTAAGAGGGGCTTTAGACGC |
| | sequence | CTGAAGGAGCTGGTGTACATGCGGTGTCTGGGCAACTCCTGGTCCAGCAATTGC |
| | | CAGTGTACCTCTAACTCCCATGACAAGAGCAGAAAGCAGGTGACAGCCCAGCTG |
| | | GAGCACCAGAAGGAGCAGCAGACCACAACCGATATGCAGAAGCCCACCCAGTCT |
| | | ATGCACCAGGAGAATCTGACAGGCCATTGCAGAGAGCCACCCCCTTGGAAGCAC |
| | | GAGGATAGCAAGCGCATCTATCATTTCGTGGAGGGCCAGTCTGTGCACTACGAG |
| | | TGTATCCCCGGCTATAAGGCCCTGCAGAGAGGCCCTGCTATCTCCATCTGCAAG |
| | | ATGAAGTGTGGCAAGACCGGCTGGACACAGCCTCAGCTGACCTGCGTGGACGAG |
| | | AGGGAGCACCATCGGTTCCTGGCTAGCGAGGAGTCTCAGGGCTCCCGCAACTCT |
| | | TCCCCTGAGAGCGAGACATCTTGTCCAATCACAACCACAGATTTTCCACAGCCC |
| | | ACCGAGACAACCGCTATGACAGAGACCTTCGTGCTGACTATGGAATACAAA |
| 155 | His tag DNA | CACCACCACCACCACCAC |
| | Sequence | |
| 156 | Stop codons | TAATGA |
| 157 | Murine IL-2 | GCACCTACATCATCATCAACTTCATCCTCCACCGCTGAGGCTCAGCAACAACAG |
| | C140S DNA | CAACAACAGCAGCAGCAGCAGCAGCATCTGGAGCAGCTGCTGATGGACCTGCAG |
| | sequence | GAGCTGCTGTCCAGAATGGAGAACTACCGCAATCTGAAGCTGCCAAGGATGCTG |
| | | ACCTTCAAGTTTTATCTGCCCAAGCAGGCCACAGAGCTGAAGGACCTGCAGTGC |
| | | CTGGAGGATGAGCTGGGCCCACTGAGGCACGTGCTGGACCTGACCCAGAGCAAG |
| | | TCTTTCCAGCTGGAGGATGCTGAGAACTTTATCTCCAATATCCGGGTGACCGTG |
| | | GTGAAGCTGAAGGGCAGCGACAACACATTCGAGTGCCAGTTTGACGATGAGTCT |
| | | GCCACCGTGGTGGATTTCCTGAGGCGGTGGATCGCTTTTTCCCAGAGCATCATC |
| | | TCCACAAGCCCTCA |
| 158 | Murine IgG1 | GGATGCAAACCCTGTATCTGTACCGTGCCCGAGGTCTCTTCCGTCTTTATTTTC |
| | T252M Fc | CCCCCCAAGCCTAAGGATGTGCTGATGATTACTCTGACCCCCAAGGTGACATGC |
| | domain DNA | GTGGTGGTGGACATCAGCAAGGACGATCCTGAGGTGCAGTTCTCTTGGTTTGTG |
| | sequence | GACGATGTGGAGGTGCACACCGCCCAGACACAGCCAAGGGAGGAGCAGTTCAAT |
| | | AGCACCTTTCGGTCCGTGAGCGAGCTGCCCATCATGCATCAGGATTGGCTGAAT |
| | | GGCAAGGAGTTCAAGTGCAGAGTGAACTCTGCCGCTTTTCCCGCTCCTATCGAG |
| | | AAGACCATCTCCAAGACAAAGGGCCGCCCAAAGGCTCCACAGGTGTACACCATC |
| | | CCACCTCCAAAGGAGCAGATGGCTAAGGACAAGGTGTCTCTGACCTGTATGATC |
| | | ACAGACTTCTTTCCTGAGGACATCACAGTGGAGTGGCAGTGGAACGGCCAGCCT |
| | | GCCGAGAACTATAAGAATACCCAGCCAATCATGGACACAGATGGCTCTTACTTC |
| | | GTGTATTCCAAGCTGAACGTGCAGAAGTCCAATTGGGAGGCTGGCAACACCTTT |
| | | ACATGTAGCGTGCTGCACGAAGGTCTGCATAACCATCATACCGAAAAATCACTG |
| | | TCACACTCCCCTGGA |
| 159 | Murine IgG1 | GGATGCAAACCCTGTATCTGTACCGTGCCCGAGGTCTCTTCCGTCTTTATTTTC |
| | Fc domain | CCCCCCAAGCCTAAGGATGTGCTGACTATTACTCTGACCCCCAAGGTGACATGC |
| | DNA sequence | GTGGTGGTGGACATCAGCAAGGACGATCCTGAGGTGCAGTTCTCTTGGTTTGTG |
| | | GACGATGTGGAGGTGCACACCGCCCAGACACAGCCAAGGGAGGAGCAGTTCAAT |
| | | AGCACCTTTCGGTCCGTGAGCGAGCTGCCCATCATGCATCAGGATTGGCTGAAT |
| | | GGCAAGGAGTTCAAGTGCAGAGTGAACTCTGCCGCTTTTCCCGCTCCTATCGAG |
| | | AAGACCATCTCCAAGACAAAGGGCCGCCCAAAGGCTCCACAGGTGTACACCATC |
| | | CCACCTCCAAAGGAGCAGATGGCTAAGGACAAGGTGTCTCTGACCTGTATGATC |
| | | ACAGACTTCTTTCCTGAGGACATCACAGTGGAGTGGCAGTGGAACGGCCAGCCT |
| | | GCCGAGAACTATAAGAATACCCAGCCAATCATGGACACAGATGGCTCTTACTTC |
| | | GTGTATTCCAAGCTGAACGTGCAGAAGTCCAATTGGGAGGCTGGCAACACCTTT |
| | | ACATGTAGCGTGCTGCACGAAGGTCTGCATAACCATCATACCGAAAAATCACTG |
| | | TCACACTCCCCTGGAAAA |
| 160 | Human IL-2 | GCTCCTACATCCTCCAGCACCAAGAAAACCCAGCTGCAGTTGGAGCATCTGCTG |
| | C125S DNA | CTGGACCTGCAGATGATCCTGAACGGCATCAACAACTACAAGAACCCCAAGCTG |
| | sequence | ACCCGGATGCTGACCTTCAAGTTCTACATGCCCAAGAAGGCCACCGAGCTGAAA |
| | | CATCTGCAGTGCCTGGAAGAGGAACTGAAGCCCCTGGAAGAAGTGCTGAATCTG |
| | | GCCCAGTCCAAGAACTTCCACCTGAGGCCTCGGGACCTGATCTCCAACATCAAC |
| | | GTGATCGTGCTCGAGCTGAAGGGCTCCGAGACAACCTTCATGTGCGAGTACGCC |
| | | GACGAGACAGCTACCATCGTGGAATTTCTGAACCGGTGGATCACCTTCAGCCAG |
| | | TCCATCATCAGCACCCTGACA |
| 161 | Human IgG1 | GACAAGACCCACACCTGTCCTCCATGTCCTGCTCCAGAATTGCTCGGCGGACCC |
| | Fc domain | TCCGTGTTCCTGTTTCCTCCAAAGCCTAAGGACACCCTGATGATCTCTCGGACC |
| | DNA sequence | CCTGAAGTGACCTGCGTGGTGGTCGATGTGTCTCACGAGGATCCCGAAGTGAAG |
| | | TTCAATTGGTACGTGGACGGCGTGGAAGTGCACAACGCCAAGACCAAGCCTAGA |
| | | GAGGAACAGTACAACTCCACCTACAGAGTGGTGTCCGTGCTGACCGTGCTGCAC |
| | | CAGGATTGGCTGAATGGCAAAGAGTACAAGTGCAAGGTGTCCAACAAGGCCCTG |
| | | CCTGCTCCTATCGAAAAGACCATCTCCAAGGCCAAGGGCCAGCCTAGGGAACCC |
| | | CAGGTTTACACCTTGCCTCCATCTCGGGACGAGCTGACCAAGAACCAGGTGTCC |
| | | CTGACCTGTCTGGTCAAGGGCTTCTACCCCTCCGATATCGCCGTGGAATGGGAG |
| | | TCTAATGGCCAGCCTGAAAACAATTACAAGACAACCCCTCCTGTGCTGGACTCC |
| | | GACGGCTCATTCTTCCTGTACAGCAAGCTGACAGTGGACAAGTCCAGATGGCAG |
| | | CAGGGCAACGTGTTCTCCTGCTCCGTGATGCATGAGGCCCTGCACAACCACTAC |
| | | ACCCAGAAGTCCCTGTCTCTGTCCCCTGGC |
| 162 | Human IL-2 | GCACCTACTTCAAGTTCTACAAAGAAAACACAGCTACAACTGGAGCATTTACTT |
| | DNA sequence | CTGGATTTACAGATGATTTTGAATGGAATTAATAATTACAAGAATCCCAAACTC |
| | | ACCAGGATGCTCACATTTAAGTTTTACATGCCCAAGAAGGCCACAGAACTGAAA |
| | | CATCTTCAGTGTCTAGAAGAAGAACTCAAACCTCTGGAGGAAGTGCTAAATTTA |
| | | GCTCAAAGCAAAAACTTTCACTTAAGACCCAGGGACTTAATCAGCAATATCAAC |
| | | GTAATAGTTCTGGAACTAAAGGGATCTGAAACAACATTCATGTGTGAATATGCT |
| | | GATGAGACAGCAACCATTGTAGAATTTCTGAACAGATGGATTACCTTTTGTCAA |
| | | AGCATCATCTCAACACTGACT |
| 163 | Human IgG1 | GACAAAACTCACACATGCCCACCGTGCCCAGCACCTGAACTCCTGGGGGGACCG |
| | K392D | TCAGTCTTCCTCTTCCCCCCAAAACCCAAGGACACCCTCATGATCTCCCGGACC |
| | K409D Fc | CCTGAGGTCACATGCGTGGTGGTGGACGTGAGCCACGAAGACCCTGAGGTCAAG |
| | domain DNA | TTCAACTGGTACGTGGACGGCGTGGAGGTGCATAATGCCAAGACAAAGCCGCGG |
| | sequence | GAGGAGCAGTACAACAGCACGTACCGTGTGGTCAGCGTCCTCACCGTCCTGCAC |
| | | CAGGACTGGCTGAATGGCAAGGAGTACAAGTGCAAGGTCTCCAACAAAGCCCTC |
| | | CCAGCCCCCATCGAGAAAACCATCTCCAAAGCCAAAGGGCAGCCCCGAGAACCA |
| | | CAGGTGTACACCCTGCCCCCATCCCGGGATGAGCTGACCAAGAACCAGGTCAGC |
| | | CTGACCTGCCTGGTCAAAGGCTTCTATCCCAGCGACATCGCCGTGGAGTGGGAG |
| | | AGCAATGGGCAGCCGGAGAACAACTACGACACCACGCCTCCCGTGCTGGACTCC |
| | | GACGGCTCCTTCTTCCTCTATAGCGACCTCACCGTGGACAAGAGCAGGTGGCAG |
| | | CAGGGGAACGTCTTCTCATGCTCCGTGATGCATGAGGCTCTGCACAACCACTAC |
| | | ACGCAGAAGAGCCTCTCCCTGTCTCCGGGT |
| 164 | Human IL- | GAGCTCTGTGACGATGACCCGCCAGAGATCCCACACGCCACATTCAAAGCCATG |
| | 2Raplha DNA | GCCTACAAGGAAGGAACCATGTTGAACTGTGAATGCAAGAGAGGTTTCCGCAGA |
| | Sequence | ATAAAAAGCGGGTCACTCTATATGCTCTGTACAGGAAACTCTAGCCACTCGTCC |
| | | TGGGACAACCAATGTCAATGCACAAGCTCTGCCACTCGGAACACAACGAAACAA |
| | | GTGACACCTCAACCTGAAGAACAGAAAGAAAGGAAAACCACAGAAATGCAAAGT |
| | | CCAATGCAGCCAGTGGACCAAGCGAGCCTTCCAGGTCACTGCAGGGAACCTCCA |
| | | CCATGGGAAAATGAAGCCACAGAGAGAATTTATCATTTCGTGGTGGGGCAGATG |
| | | GTTTATTATCAGTGCGTCCAGGGATACAGGGCTCTACACAGAGGTCCTGCTGAG |
| | | AGCGTCTGCAAAATGACCCACGGGAAGACAAGGTGGACCCAGCCCCAGCTCATA |
| | | TGCACAGGTGAAATGGAGACCAGTCAGTTTCCAGGTGAAGAGAAGCCTCAGGCA |
| | | AGCCCCGAAGGCCGTCCTGAGAGTGAGACTTCCTGCCTCGTCACAACAACAGAT |
| | | TTTCAAATACAGACAGAAATGGCTGCAACCATGGAGACGTCCATATTTACAACA |
| | | GAGTACCAG |
| 165 | Gly-Ser Linker | TCTGGTGGCGGTGGCTCTGGTGGCGGTGGC |
| | DNA sequence | |
| 166 | Human MMP | GGTCCTCTGGGTGTCAGAGGT |
| | Cleavage Site | |
| | DNA sequence | |
| 167- | Not Used | |
| 179 | | |
| 180- | See Table 2 | |
| 700 | | |

Additional Protease-cleavable sequences

| SEQ | | |
|---|---|---|
| ID | | |
| NO | Cleavable by | Sequence |
| 701 | MMP7 | KRALGLPG |
| 702 | MMP7 | (DE)₈RPLALWRS(DR)₈ |
| 703 | MMP9 | PR(S/T)(L/I)(S/T) |
| 704 | MMP9 | LEATA |
| 705 | MMP11 | GGAANLVRGG |
| 706 | MMP14 | SGRIGFLRTA |
| 707 | MMP | PLGLAG |
| 708 | MMP | PLGLAX |
| 709 | MMP | PLGC(me)AG |
| 710 | MMP | ESPAYYTA |
| 711 | MMP | RLQLKL |
| 712 | MMP | RLQLKAC |
| 713 | MMP, MMP9, | EP(Cit)G(Hof)YL |
| | MMP14 | |
| 714 | Urokinase | SGRSA |
| | plasminogen | |
| | activator | |
| | (uPA) | |
| 715 | Urokinase | DAFK |
| | plasminogen | |
| | activator | |
| | (uPA) | |
| 716 | Urokinase | GGGRR |
| | plasminogen | |
| | activator | |
| | (uPA) | |
| 717 | Lysomal | GFLG |
| | Enzyme | |
| 718 | Lysomal | ALAL |
| | Enzyme | |
| 719 | Lysomal | FK |
| | Enzyme | |
| 720 | Cathepsin B | NLL |
| 721 | Cathepsin D | PIC(Et)FF |
| 722 | Cathepsin K | GGPRGLPG |
| 723 | Prostate | HSSKLQ |
| | Specific | |
| | Antigen | |
| 724 | Prostate | HSSKLQL |
| | Specific | |
| | Antigen | |
| 725 | Prostate | HSSKLQEDA |
| | Specific | |
| | Antigen | |
| 726 | Herpes | LVLASSSFGY |
| | Simplex Virus | |
| | Protease | |
| 727 | HIV Protease | GVSQNYPIVG |
| 728 | CMV Protease | GVVQASCRLA |
| 729 | Thrombin | F(Pip)RS |
| 730 | Thrombin | DPRSFL |
| 731 | Thrombin | PPRSFL |
| 732 | Caspase-3 | DEVD |
| 733 | Caspase-3 | DEVDP |
| 734 | Caspase-3 | KGSGDVEG |
| 735 | Interleukin 1β | GWEHDG |
| | converting | |
| | enzyme | |
| 736 | Enterokinase | EDDDDKA |
| 737 | FAP | KQEQNPGST |
| 738 | Kallikrein 2 | GKAFRR |
| 739 | Plasmin | DAFK |
| 740 | Plasmin | DVLK |
| 741 | Plasmin | DAFK |
| 742 | TOP | ALLLALL |
| 743- | Not Used | |
| 799 | | |

Additional fusion polypeptides

| SEQ | | | | | |
|---|---|---|---|---|---|
| ID | | | | | |
| NO | Description | Sequence | Species | Function | Notes |
| 800 | TBM01 | MVSKGEELFTGVVPILVELDGDVNGHKFSVSGEGEGDATYGKLTLKFICT | | fusion | tool |
| | | TGKLPVPWPTLVTTLTYGVQCFSRYPDHMKQHDFFKSAMPEGYVQERTIF | | protein | |
| | | FKDDGNYKTRAEVKFEGDTLVNRIELKGIDFKEDGNILGHKLEYNYNSHN | | | |
| | | VYIMADKQKNGIKVNFKIRHNIEDGSVQLADHYQQNTPIGDGPVLLPDNH | | | |
| | | YLSTQSKLSKDPNEKRDHMVLLEFVTAAGITLGMDELYKGGGGSASKAQK | | | |
| | | AQAKQWKQAQKAQKAQAKQAKQAKQWSGGGGSGGGGGPLGVRGGGGGSGG | | | |
| | | GGSMVSKGEELIKENMHMKLYMEGTVNNHHFKCTSEGEGKPYEGTQTMRI | | | |
| | | KVVEGGPLPFAFDILATSFMYGSRTFINHTQGIPDFFKQSFPEGFTWERV | | | |
| | | TTYEDGGVLTATQDTSLQDGCLIYNVKIRGVNFPSNGPVMQKKTLGWEAN | | | |
| | | TEMLYPADGGLEGRSDMALKLVGGGHLICNFKTTYRSKKPAKNLKMPGVY | | | |
| | | YVDHRLERIKEADKETYVEQHEVAVARYCDLPSKLGHKLNGSGGGGGCKP | | | |
| | | CICTVPEVSSVFIFPPKPKDVLTITLTPKVTCVVVDISKDDPEVQFSWFV | | | |
| | | DDVEVHTAQTQPREEQFNSTFRSVSELPIMHQDWLNGKEFKCRVNSAAFP | | | |
| | | APIEKTISKTKGRPKAPQVYTIPPPKEQMAKDKVSLTCMITDFFPEDITV | | | |
| | | EWQWNGQPAENYKNTQPIMDTDGSYFVYSKLNVQKSNWEAGNTFTCSVLH | | | |
| | | EGLHNHHTEKSLSHSPGK | | | |
| 801 | TBM02 | MVSKGEELFTGVVPILVELDGDVNGHKFSVSGEGEGDATYGKLTLKFICT | | fusion | tool |
| | | TGKLPVPWPTLVTTLTYGVQCFSRYPDHMKQHDFFKSAMPEGYVQERTIF | | protein | |
| | | FKDDGNYKTRAEVKFEGDTLVNRIELKGIDFKEDGNILGHKLEYNYNSHN | | | |
| | | VYIMADKQKNGIKVNFKIRHNIEDGSVQLADHYQQNTPIGDGPVLLPDNH | | | |
| | | YLSTQSKLSKDPNEKRDHMVLLEFVTAAGITLGMDELYKSGGGGSGGGGG | | | |
| | | PLGVRGGGGGSGGGGSMVSKGEELIKENMHMKLYMEGTVNNHHFKCTSEG | | | |
| | | EGKPYEGTQTMRIKVVEGGPLPFAFDILATSFMYGSRTFINHTQGIPDFF | | | |
| | | KQSFPEGFTWERVTTYEDGGVLTATQDTSLQDGCLIYNVKIRGVNFPSNG | | | |
| | | PVMQKKTLGWEANTEMLYPADGGLEGRSDMALKLVGGGHLICNFKTTYRS | | | |
| | | KKPAKNLKMPGVYYVDHRLERIKEADKETYVEQHEVAVARYCDLPSKLGH | | | |
| | | KLNGSGGGGGCKPCICTVPEVSSVFIFPPKPKDVLTITLTPKVTCVVVDI | | | |
| | | SKDDPEVQFSWFVDDVEVHTAQTQPREEQFNSTFRSVSELPIMHQDWLNG | | | |
| | | KEFKCRVNSAAFPAPIEKTISKTKGRPKAPQVYTIPPPKEQMAKDKVSLT | | | |
| | | CMITDFFPEDITVEWQWNGQPAENYKNTQPIMDTDGSYFVYSKLNVQKSN | | | |
| | | WEAGNTFTCSVLHEGLHNHHTEKSLSHSPGK | | | |
| 802 | TBM05 | MVSKGEELFTGVVPILVELDGDVNGHKFSVSGEGEGDATYGKLTLKFICT | | fusion | tool |
| | | TGKLPVPWPTLVTTLTYGVQCFSRYPDHMKQHDFFKSAMPEGYVQERTIF | | protein | |
| | | FKDDGNYKTRAEVKFEGDTLVNRIELKGIDFKEDGNILGHKLEYNYNSHN | | | |
| | | VYIMADKQKNGIKVNFKIRHNIEDGSVQLADHYQQNTPIGDGPVLLPDNH | | | |
| | | YLSTQSKLSKDPNEKRDHMVLLEFVTAAGITLGMDELYKSGGGGSGGGGG | | | |
| | | PLGVRGGGGGSGGGGSMVSKGEELIKENMHMKLYMEGTVNNHHFKCTSEG | | | |
| | | EGKPYEGTQTMRIKVVEGGPLPFAFDILATSFMYGSRTFINHTQGIPDFF | | | |
| | | KQSFPEGFTWERVTTYEDGGVLTATQDTSLQDGCLIYNVKIRGVNFPSNG | | | |
| | | PVMQKKTLGWEANTEMLYPADGGLEGRSDMALKLVGGGHLICNFKTTYRS | | | |
| | | KKPAKNLKMPGVYYVDHRLERIKEADKETYVEQHEVAVARYCDLPSKLGH | | | |
| | | KLNGSGGGGGCKPCICTVPEVSSVFIFPPKPKDVLTITLTPKVTCVVVDI | | | |
| | | SKDDPEVQFSWFVDDVEVHTAQTQPREEQFNSTFRSVSELPIMHQDWLNG | | | |
| | | KEFKCRVNSAAFPAPIEKTISKTKGRPKAPQVYTIPPPKEQMAKDKVSLT | | | |
| | | CMITDFFPEDITVEWQWNGQPAENYKNTQPIMDTDGSYFVYSKLNVQKSN | | | |
| | | WEAGNTFTCSVLHEGLHNHHTEKSLSHSPGKGGGGSASKAQKAQAKQWKQ | | | |
| | | AQKAQKAQAKQAKQAKQW | | | |
| 803 | Construct F | APTSSSTKKTQLQLEHLLLDLQMILNGINNY | | fusion | |
| | | KNPKLTRMLTFKFYMPKKATELKHLQCLEEELKPLEEVLNLAQSKNFHLR | | protein | |
| | | PRDLISNINVIVLELKGSETTFMCEYADETATIVEFLNRWITFSQSIIST | | | |
| | | LTSGGGGSGGGGGPLGVRGGGGGSGGGGSELCLYDPPEVPNATFKALSYK | | | |
| | | NGTILNCECKRGFRRLKELVYMRCLGNSWSSNCQCTSSATRNTTKQVTPQ | | | |
| | | PEEQKERKTTEMQSPMQPVDQASLPGHCREPPPWENEATERIYHFVVGQM | | | |
| | | VYYQCVQGYRALHRGPAESVCKMTHGKTRWTQPQLICTGEMETSQFPGEE | | | |
| | | KPQASPEGRPESETSCLVTTTDFQIQTEMAATMETSIFTTEYQDKTHTCP | | | |
| | | PCPAPELLGGPSVFLFPPKPKDTLMISRTPEVTCVVVDVSHEDPEVKFNW | | | |
| | | YVDGVEVHNAKTKPREEQYNSTYRVVSVLTVLHQDWLNGKEYKCKVSNKA | | | |
| | | LPAPIEKTISKAKGQPREPQVYTLPPSRDELTKNQVSLTCLVKGFYPSDI | | | |
| | | AVEWESNGQPENNYKTTPPVLDSDGSFFLYSKLTVDKSRWQQGNVFSCSV | | | |
| | | MHEALHNHYTQKSLSLSPG | | | |
| 804 | Construct G | APTSSSTKKTQLQLEHLLLDLQMILNGINNY | | fusion | |
| | | KNPKLTRMLTFKFYMPKKATELKHLQCLEEELKPLEEVLNLAQSKNFHLR | | protein | |
| | | PRDLISNINVIVLELKGSETTFMCEYADETATIVEFLNRWITFSQSIIST | | | |
| | | LTSGGGGSGGGGGPLGVRGGGGGSGGGGSELCDDDPPEIPHATFKAMAYK | | | |
| | | EGTMLNCECKRGFRRIKSGSLYMLCTGNSSHSSWDNQCQCTSSATRNTTK | | | |
| | | QVTPQPEEQKERKTTEMQSPMQPVDQASLPGHCREPPPWENEATERIYHF | | | |
| | | VVGQMVYYQCVQGYRALHRGPAESVCKMTHGKTRWTQPQLICTGEMETSQ | | | |
| | | FPGEEKPQASPEGRPESETSCLVTTTDFQIQTEMAATMETSIFTTEYQGS | | | |
| | | GGGGDKTHTCPPCPAPELLGGPSVFLFPPKPKDTLMISRTPEVTCVVVDV | | | |
| | | SHEDPEVKFNWYVDGVEVHNAKTKPREEQYNSTYRVVSVLTVLHQDWLNG | | | |
| | | KEYKCKVSNKALPAPIEKTISKAKGQPREPQVYTLPPSRDELTKNQVSLT | | | |
| | | CLVKGFYPSDIAVEWESNGQPENNYKTTPPVLDSDGSFFLYSKLTVDKSR | | | |
| | | WQQGNVFSCSVMHEALHNHYTQKSLSLSPG | | | |
| 805 | Construct H | APTSSSTKKTQLQLEHLLLDLQMILNGINNYKNPKLTRMLTFKFYMPKKA | | fusion | |
| | | TELKHLQCLEEELKPLEEVLNLAQSKNFHLRPRDLISNINVIVLELKGSE | | protein | |
| | | TTFMCEYADETATIVEFLNRWITFSQSIISTLTSGGGGSGGGGGPLGVRG | | | |
| | | GGGGSGGGGSELCDDDPPEIPHATFKAMAYKEGTMLNCECKRGFRRIKSG | | | |
| | | SLYMLCTGNSSHSSWDNQCQCTSSATRNTTKQVTPQPEEQKERKTTEMQS | | | |
| | | PMQPVDQASLPGHCREPPPWENEATERIYHFVVGQMVYYQCVQGYRALHR | | | |
| | | GPAESVCKMTHGKTRWTQPQLICTGEMETSQFPGEEKPGSGGGGDKTHTC | | | |
| | | PPCPAPELLGGPSVFLFPPKPKDTLMISRTPEVTCVVVDVSHEDPEVKFN | | | |
| | | WYVDGVEVHNAKTKPREEQYNSTYRVVSVLTVLHQDWLNGKEYKCKVSNK | | | |
| | | ALPAPIEKTISKAKGQPREPQVYTLPPSRDELTKNQVSLTCLVKGFYPSD | | | |
| | | IAVEWESNGQPENNYKTTPPVLDSDGSFFLYSKLTVDKSRWQQGNVFSCS | | | |
| | | VMHEALHNHYTQKSLSLSPG | | | |
| 806 | Construct V | APTSSSTKKTQLQLEHLLLDLQMILNGINNYKNPKLTRMLTFKFYMPKKA | | fusion | |
| | | TELKHLQCLEEELKPLEEVLNLAQSKNFHLRPRDLISNINVIVLELKGSE | | protein | |
| | | TTFMCEYADETATIVEFLNRWITFSQSIISTLTSGGGGSGGGGGPLGVRG | | | |
| | | GGGGSGGGGSGGGGSGGGGSELCDDDPPEIPHATFKAMAYKEGTMLNCEC | | | |
| | | KRGFRRIKSGSLYMLCTGNSSHSSWDNQCQCTSSATRNTTKQVTPQPEEQ | | | |
| | | KERKTTEMQSPMQPVDQASLPGHCREPPPWENEATERIYHFVVGQMVYYQ | | | |
| | | CVQGYRALHRGPAESVCKMTHGKTRWTQPQLICTGEMETSQFPGEEKPQA | | | |
| | | SPEGRPESETSCLVTTTDFQIQTEMAATMETSIFTTEYQGSGGGGDKTHT | | | |
| | | CPPCPAPELLGGPSVFLFPPKPKDTLMISRTPEVTCVVVDVSHEDPEVKF | | | |
| | | NWYVDGVEVHNAKTKPREEQYNSTYRVVSVLTVLHQDWLNGKEYKCKVSN | | | |
| | | KALPAPIEKTISKAKGQPREPQVYTLPPSRDELTKNQVSLTCLVKGFYPS | | | |
| | | DIAVEWESNGQPENNYKTTPPVLDSDGSFFLYSKLTVDKSRWQQGNVFSC | | | |
| | | SVMHEALHNHYTQKSLSLSPG | | | |
| 807 | Construct W | APTSSSTKKTQLQLEHLLLDLQMILNGINNYKNPKLTRMLTFKFYMPKKA | | fusion | |
| | | TELKHLQCLEEELKPLEEVLNLAQSKNFHLRPRDLISNINVIVLELKGSE | | protein | |
| | | TTFMCEYADETATIVEFLNRWITFSQSIISTLTSGGGGSGGGGGPLGVRG | | | |
| | | GGGGSGGGGSGGGGSGGGGSGGGGSGGGGSELCDDDPPEIPHATFKAMAY | | | |
| | | KEGTMLNCECKRGFRRIKSGSLYMLCTGNSSHSSWDNQCQCTSSATRNTT | | | |
| | | KQVTPQPEEQKERKTTEMQSPMQPVDQASLPGHCREPPPWENEATERIYH | | | |
| | | FVVGQMVYYQCVQGYRALHRGPAESVCKMTHGKTRWTQPQLICTGEMETS | | | |
| | | QFPGEEKPQASPEGRPESETSCLVTTTDFQIQTEMAATMETSIFTTEYQG | | | |
| | | SGGGGDKTHTCPPCPAPELLGGPSVFLFPPKPKDTLMISRTPEVTCVVVD | | | |
| | | VSHEDPEVKFNWYVDGVEVHNAKTKPREEQYNSTYRVVSVLTVLHQDWLN | | | |
| | | GKEYKCKVSNKALPAPIEKTISKAKGQPREPQVYTLPPSRDELTKNQVSL | | | |
| | | TCLVKGFYPSDIAVEWESNGQPENNYKTTPPVLDSDGSFFLYSKLTVDKS | | | |
| | | RWQQGNVFSCSVMHEALHNHYTQKSLSLSPG | | | |
| 808 | Construct X | APTSSSTSSSTAEAQQQQQQQQQQQQHLEQLLMDLQELLSRMENYRNLKLPRML | | fusion | |
| | | TFKFYLPKQATELKDLQCLEDELGPLRHVLDLTQSKSFQLEDAENFISNIRVTV | | protein | |
| | | VKLKGSDNTFECQFDDESATVVDFLRRWIAFSQSIISTSPQSGGGGSGGGGGPA | | | |
| | | ALIGGGGGSGGGGSELCLYDPPEVPNATFKALSYKNGTILNCECKRGFRRLKEL | | | |
| | | VYMRCLGNSWSSNCQCTSNSHDKSRKQVTAQLEHQKEQQTTTDMQKPTQSMHQE | | | |
| | | NLTGHCREPPPWKHEDSKRIYHFVEGQSVHYECIPGYKALQRGPAISICKMKCG | | | |
| | | KTGWTQPQLTCVDEREHHRFLASEESQGSRNSSPESETSCPITTTDFPQPTETT | | | |
| | | AMTETFVLTMEYKGCKPCICTVPEVSSVFIFPPKPKDVLTITLTPKVTCVVVDI | | | |
| | | SKDDPEVQFSWFVDDVEVHTAQTQPREEQFNSTFRSVSELPIMHQDWLNGKEFK | | | |
| | | CRVNSAAFPAPIEKTISKTKGRPKAPQVYTIPPPKEQMAKDKVSLTCMITDFFP | | | |
| | | EDITVEWQWNGQPAENYKNTQPIMDTDGSYFVYSKLNVQKSNWEAGNTFTCSVL | | | |
| | | HEGLHNHHTEKSLSHSPGK | | | |
| 809 | Construct Y | APTSSSTSSSTAEAQQQQQQQQQQQQHLEQLLMDLQELLSRMENYRNLKL | | fusion | |
| | | PRMLTFKFYLPKQATELKDLQCLEDELGPLRHVLDLTQSKSFQLEDAENF | | protein | |
| | | ISNIRVTVVKLKGSDNTFECQFDDESATVVDFLRRWIAFSQSIISTSPQV | | | |
| | | RIQRKKEKMKETGPLGVRGGGGGSGGGGSELCLYDPPEVPNATFKALSYK | | | |
| | | NGTILNCECKRGFRRLKELVYMRCLGNSWSSNCQCTSNSHDKSRKQVTAQ | | | |
| | | LEHQKEQQTTTDMQKPTQSMHQENLTGHCREPPPWKHEDSKRIYHFVEGQ | | | |
| | | SVHYECIPGYKALQRGPAISICKMKCGKTGWTQPQLTCVDEREHHRFLAS | | | |
| | | EESQGSRNSSPESETSCPITTTDFPQPTETTAMTETFVLTMEYKIEGRMD | | | |
| | | GCKPCICTVPEVSSVFIFPPKPKDVLTITLTPKVTCVVVDISKDDPEVQF | | | |
| | | SWFVDDVEVHTAQTQPREEQFNSTFRSVSELPIMHQDWLNGKEFKCRVNS | | | |
| | | AAFPAPIEKTISKTKGRPKAPQVYTIPPPKEQMAKDKVSLTCMITDFFPE | | | |
| | | DITVEWQWNGQPAENYKNTQPIMDTDGSYFVYSKLNVQKSNWEAGNTFTC | | | |
| | | SVLHEGLHNHHTEKSLSHSPGK | | | |
| 810 | Construct Z | APTSSSTSSSTAEAQQQQQQQQQQQQHLEQLLMDLQELLSRMENYRNLKLPRML | | fusion | |
| | | TFKFYLPKQATELKDLQCLEDELGPLRHVLDLTQSKSFQLEDAENFISNIRVTV | | protein | |
| | | VKLKGSDNTFECQFDDESATVVDFLRRWIAFCQSIISTSPQSGGGGSGGGGGPL | | | |
| | | GLARGGGGSGGGGSELCLYDPPEVPNATFKALSYKNGTILNCECKRGFRRLKEL | | | |
| | | VYMRCLGNSWSSNCQCTSNSHDKSRKQVTAQLEHQKEQQTTTDMQKPTQSMHQE | | | |
| | | NLTGHCREPPPWKHEDSKRIYHFVEGQSVHYECIPGYKALQRGPAISICKMKCG | | | |
| | | KTGWTQPQLTCVDEREHHRFLASEESQGSRNSSPESETSCPITTTDFPQPTETT | | | |
| | | AMTETFVLTMEYKGCKPCICTVPEVSSVFIFPPKPKDVLTITLTPKVTCVVVDI | | | |
| | | SKDDPEVQFSWFVDDVEVHTAQTQPREEQFNSTFRSVSELPIMHQDWLNGKEFK | | | |
| | | CRVNSAAFPAPIEKTISKTKGRPKAPQVYTIPPPKEQMAKDKVSLTCMITDFFP | | | |
| | | EDITVEWQWNGQPAENYKNTQPIMDTDGSYFVYSKLNVQKSNWEAGNTFTCSVL | | | |
| | | HEGLHNHHTEKSLSHSPGK | | | |
| 811 | Construct AA | APTSSSTSSSTAEAQQQQQQQQQQQQHLEQLLMDLQELLSRMENYRNLKLPRML | | fusion | |
| | | TFKFYLPKQATELKDLQCLEDELGPLRHVLDLTQSKSFQLEDAENFISNIRVTV | | protein | |
| | | VKLKGSDNTFECQFDDESATVVDFLRRWIAFCQSIISTSPQSGGFHRRIKAGPL | | | |
| | | GVRGGGGGSGGGGSELCLYDPPEVPNATFKALSYKNGTILNCECKRGFRRLKEL | | | |
| | | VYMRCLGNSWSSNCQCTSNSHDKSRKQVTAQLEHQKEQQTTTDMQKPTQSMHQE | | | |
| | | NLTGHCREPPPWKHEDSKRIYHFVEGQSVHYECIPGYKALQRGPAISICKMKCG | | | |
| | | KTGWTQPQLTCVDEREHHRFLASEESQGSRNSSPESETSCPITTTDFPQPTETT | | | |
| | | AMTETFVLTMEYKGCKPCICTVPEVSSVFIFPPKPKDVLTITLTPKVTCVVVDI | | | |
| | | SKDDPEVQFSWFVDDVEVHTAQTQPREEQFNSTFRSVSELPIMHQDWLNGKEFK | | | |
| | | CRVNSAAFPAPIEKTISKTKGRPKAPQVYTIPPPKEQMAKDKVSLTCMITDFFP | | | |
| | | EDITVEWQWNGQPAENYKNTQPIMDTDGSYFVYSKLNVQKSNWEAGNTFTCSVL | | | |
| | | HEGLHNHHTEKSLSHSPGK | | | |
| 812 | Construct BB | APTSSSTSSSTAEAQQQQQQQQQQQQHLEQLLMDLQELLSRMENYRNLKLPRML | | fusion | |
| | | TFKFYLPKQATELKDLQCLEDELGPLRHVLDLTQSKSFQLEDAENFISNIRVTV | | protein | |
| | | VKLKGSDNTFECQFDDESATVVDFLRRWIAFCQSIISTSPQSGGFHRRIKAGVR | | | |
| | | LGPGGGGGSGGGGSELCLYDPPEVPNATFKALSYKNGTILNCECKRGFRRLKEL | | | |
| | | VYMRCLGNSWSSNCQCTSNSHDKSRKQVTAQLEHQKEQQTTTDMQKPTQSMHQE | | | |
| | | NLTGHCREPPPWKHEDSKRIYHFVEGQSVHYECIPGYKALQRGPAISICKMKCG | | | |
| | | KTGWTQPQLTCVDEREHHRFLASEESQGSRNSSPESETSCPITTTDFPQPTETT | | | |
| | | AMTETFVLTMEYKGCKPCICTVPEVSSVFIFPPKPKDVLTITLTPKVTCVVVDI | | | |
| | | SKDDPEVQFSWFVDDVEVHTAQTQPREEQFNSTFRSVSELPIMHQDWLNGKEFK | | | |
| | | CRVNSAAFPAPIEKTISKTKGRPKAPQVYTIPPPKEQMAKDKVSLTCMITDFFP | | | |
| | | EDITVEWQWNGQPAENYKNTQPIMDTDGSYFVYSKLNVQKSNWEAGNTFTCSVL | | | |
| | | HEGLHNHHTEKSLSHSPGK | | | |
| 813 | Construct CC | APTSSSTSSSTAEAQQQQQQQQQQQQHLEQLLMDLQELLSRMENYRNLKLPRML | | fusion | |
| | | TFKFYLPKQATELKDLQCLEDELGPLRHVLDLTQSKSFQLEDAENFISNIRVTV | | protein | |
| | | VKLKGSDNTFECQFDDESATVVDFLRRWIAFCQSIISTSPQGHHPHGHHPHGPL | | | |
| | | GVRGGGGGSGGGGSELCLYDPPEVPNATFKALSYKNGTILNCECKRGFRRLKEL | | | |
| | | VYMRCLGNSWSSNCQCTSNSHDKSRKQVTAQLEHQKEQQTTTDMQKPTQSMHQE | | | |
| | | NLTGHCREPPPWKHEDSKRIYHFVEGQSVHYECIPGYKALQRGPAISICKMKCG | | | |
| | | KTGWTQPQLTCVDEREHHRFLASEESQGSRNSSPESETSCPITTTDFPQPTETT | | | |
| | | AMTETFVLTMEYKGCKPCICTVPEVSSVFIFPPKPKDVLTITLTPKVTCVVVDI | | | |
| | | SKDDPEVQFSWFVDDVEVHTAQTQPREEQFNSTFRSVSELPIMHQDWLNGKEFK | | | |
| | | CRVNSAAFPAPIEKTISKTKGRPKAPQVYTIPPPKEQMAKDKVSLTCMITDFFP | | | |
| | | EDITVEWQWNGQPAENYKNTQPIMDTDGSYFVYSKLNVQKSNWEAGNTFTCSVL | | | |
| | | HEGLHNHHTEKSLSHSPGK | | | |
| 814 | Construct DD | APTSSSTSSSTAEAQQQQQQQQQQQQHLEQLLMDLQELLSRMENYRNLKLPRML | | fusion | |
| | | TFKFYLPKQATELKDLQCLEDELGPLRHVLDLTQSKSFQLEDAENFISNIRVTV | | protein | |
| | | VKLKGSDNTFECQFDDESATVVDFLRRWIAFCQSIISTSPQGHHPHGHHPHGVR | | | |
| | | LGPGGGGGSGGGGSELCLYDPPEVPNATFKALSYKNGTILNCECKRGFRRLKEL | | | |
| | | VYMRCLGNSWSSNCQCTSNSHDKSRKQVTAQLEHQKEQQTTTDMQKPTQSMHQE | | | |
| | | NLTGHCREPPPWKHEDSKRIYHFVEGQSVHYECIPGYKALQRGPAISICKMKCG | | | |
| | | KTGWTQPQLTCVDEREHHRFLASEESQGSRNSSPESETSCPITTTDFPQPTETT | | | |
| | | AMTETFVLTMEYKGCKPCICTVPEVSSVFIFPPKPKDVLTITLTPKVTCVVVDI | | | |
| | | SKDDPEVQFSWFVDDVEVHTAQTQPREEQFNSTFRSVSELPIMHQDWLNGKEFK | | | |
| | | CRVNSAAFPAPIEKTISKTKGRPKAPQVYTIPPPKEQMAKDKVSLTCMITDFFP | | | |
| | | EDITVEWQWNGQPAENYKNTQPIMDTDGSYFVYSKLNVQKSNWEAGNTFTCSVL | | | |
| | | HEGLHNHHTEKSLSHSPGK | | | |
| 815 | Construct EE | APTSSSTSSSTAEAQQQQQQQQQQQQHLEQLLMDLQELLSRMENYRNLKLPRML | | fusion | |
| | | TFKFYLPKQATELKDLQCLEDELGPLRHVLDLTQSKSFQLEDAENFISNIRVTV | | protein | |
| | | VKLKGSDNTFECQFDDESATVVDFLRRWIAFCQSIISTSPQSGGGGWSHWGPLG | | | |
| | | VRGGGGGSGGGGSELCLYDPPEVPNATFKALSYKNGTILNCECKRGFRRLKELV | | | |
| | | YMRCLGNSWSSNCQCTSNSHDKSRKQVTAQLEHQKEQQTTTDMQKPTQSMHQEN | | | |
| | | LTGHCREPPPWKHEDSKRIYHFVEGQSVHYECIPGYKALQRGPAISICKMKCGK | | | |
| | | TGWTQPQLTCVDEREHHRFLASEESQGSRNSSPESETSCPITTTDFPQPTETTA | | | |
| | | MTETFVLTMEYKGCKPCICTVPEVSSVFIFPPKPKDVLTITLTPKVTCVVVDIS | | | |
| | | KDDPEVQFSWFVDDVEVHTAQTQPREEQFNSTFRSVSELPIMHQDWLNGKEFKC | | | |
| | | RVNSAAFPAPIEKTISKTKGRPKAPQVYTIPPPKEQMAKDKVSLTCMITDFFPE | | | |
| | | DITVEWQWNGQPAENYKNTQPIMDTDGSYFVYSKLNVQKSNWEAGNTFTCSVLH | | | |
| | | EGLHNHHTEKSLSHSPGK | | | |
| 816 | Construct FF | APTSSSTSSSTAEAQQQQQQQQQQQQHLEQLLMDLQELLSRMENYRNLKLPRML | | fusion | |
| | | TFKFYLPKQATELKDLQCLEDELGPLRHVLDLTQSKSFQLEDAENFISNIRVTV | | protein | |
| | | VKLKGSDNTFECQFDDESATVVDFLRRWIAFCQSIISTSPQSGGGGWSHWGVRL | | | |
| | | GPGGGGGSGGGGSELCLYDPPEVPNATFKALSYKNGTILNCECKRGFRRLKELV | | | |
| | | YMRCLGNSWSSNCQCTSNSHDKSRKQVTAQLEHQKEQQTTTDMQKPTQSMHQEN | | | |
| | | LTGHCREPPPWKHEDSKRIYHFVEGQSVHYECIPGYKALQRGPAISICKMKCGK | | | |
| | | TGWTQPQLTCVDEREHHRFLASEESQGSRNSSPESETSCPITTTDFPQPTETTA | | | |
| | | MTETFVLTMEYKGCKPCICTVPEVSSVFIFPPKPKDVLTITLTPKVTCVVVDIS | | | |
| | | KDDPEVQFSWFVDDVEVHTAQTQPREEQFNSTFRSVSELPIMHQDWLNGKEFKC | | | |
| | | RVNSAAFPAPIEKTISKTKGRPKAPQVYTIPPPKEQMAKDKVSLTCMITDFFPE | | | |
| | | DITVEWQWNGQPAENYKNTQPIMDTDGSYFVYSKLNVQKSNWEAGNTFTCSVLH | | | |
| | | EGLHNHHTEKSLSHSPGK | | | |
| 817 | Construct GG | APTSSSTSSSTAEAQQQQQQQQQQQQHLEQLLMDLQELLSRMENYRNLKLPRML | | fusion | |
| | | TFKFYLPKQATELKDLQCLEDELGPLRHVLDLTQSKSFQLEDAENFISNIRVTV | | protein | |
| | | VKLKGSDNTFECQFDDESATVVDFLRRWIAFCQSIISTSPQSGGKLWVLPKGPL | | | |
| | | GVRGGGGGSGGGGSELCLYDPPEVPNATFKALSYKNGTILNCECKRGFRRLKEL | | | |
| | | VYMRCLGNSWSSNCQCTSNSHDKSRKQVTAQLEHQKEQQTTTDMQKPTQSMHQE | | | |
| | | NLTGHCREPPPWKHEDSKRIYHFVEGQSVHYECIPGYKALQRGPAISICKMKCG | | | |
| | | KTGWTQPQLTCVDEREHHRFLASEESQGSRNSSPESETSCPITTTDFPQPTETT | | | |
| | | AMTETFVLTMEYKGCKPCICTVPEVSSVFIFPPKPKDVLTITLTPKVTCVVVDI | | | |
| | | SKDDPEVQFSWFVDDVEVHTAQTQPREEQFNSTFRSVSELPIMHQDWLNGKEFK | | | |
| | | CRVNSAAFPAPIEKTISKTKGRPKAPQVYTIPPPKEQMAKDKVSLTCMITDFFP | | | |
| | | EDITVEWQWNGQPAENYKNTQPIMDTDGSYFVYSKLNVQKSNWEAGNTFTCSVL | | | |
| | | HEGLHNHHTEKSLSHSPGK | | | |
| 818 | Construct HH | APTSSSTSSSTAEAQQQQQQQQQQQQHLEQLLMDLQELLSRMENYRNLKLPRML | | fusion | |
| | | TFKFYLPKQATELKDLQCLEDELGPLRHVLDLTQSKSFQLEDAENFISNIRVTV | | protein | |
| | | VKLKGSDNTFECQFDDESATVVDFLRRWIAFCQSIISTSPQSGGKLWVLPKGVR | | | |
| | | LGPGGGGGSGGGGSELCLYDPPEVPNATFKALSYKNGTILNCECKRGFRRLKEL | | | |
| | | VYMRCLGNSWSSNCQCTSNSHDKSRKQVTAQLEHQKEQQTTTDMQKPTQSMHQE | | | |
| | | NLTGHCREPPPWKHEDSKRIYHFVEGQSVHYECIPGYKALQRGPAISICKMKCG | | | |
| | | KTGWTQPQLTCVDEREHHRFLASEESQGSRNSSPESETSCPITTTDFPQPTETT | | | |
| | | AMTETFVLTMEYKGCKPCICTVPEVSSVFIFPPKPKDVLTITLTPKVTCVVVDI | | | |
| | | SKDDPEVQFSWFVDDVEVHTAQTQPREEQFNSTFRSVSELPIMHQDWLNGKEFK | | | |
| | | CRVNSAAFPAPIEKTISKTKGRPKAPQVYTIPPPKEQMAKDKVSLTCMITDFFP | | | |
| | | EDITVEWQWNGQPAENYKNTQPIMDTDGSYFVYSKLNVQKSNWEAGNTFTCSVL | | | |
| | | HEGLHNHHTEKSLSHSPGK | | | |
| 819 | Construct II | APTSSSTSSSTAEAQQQQQQQQQQQQHLEQLLMDLQELLSRMENYRNLKLPRML | | fusion | |
| | | TFKFYLPKQATELKDLQCLEDELGPLRHVLDLTQSKSFQLEDAENFISNIRVTV | | protein | |
| | | VKLKGSDNTFECQFDDESATVVDFLRRWIAFCQSIISTSPQSLHERHLNNNGPL | | | |
| | | GVRGGGGGSGGGGSELCLYDPPEVPNATFKALSYKNGTILNCECKRGFRRLKEL | | | |
| | | VYMRCLGNSWSSNCQCTSNSHDKSRKQVTAQLEHQKEQQTTTDMQKPTQSMHQE | | | |
| | | NLTGHCREPPPWKHEDSKRIYHFVEGQSVHYECIPGYKALQRGPAISICKMKCG | | | |
| | | KTGWTQPQLTCVDEREHHRFLASEESQGSRNSSPESETSCPITTTDFPQPTETT | | | |
| | | AMTETFVLTMEYKGCKPCICTVPEVSSVFIFPPKPKDVLTITLTPKVTCVVVDI | | | |
| | | SKDDPEVQFSWFVDDVEVHTAQTQPREEQFNSTFRSVSELPIMHQDWLNGKEFK | | | |
| | | CRVNSAAFPAPIEKTISKTKGRPKAPQVYTIPPPKEQMAKDKVSLTCMITDFFP | | | |
| | | EDITVEWQWNGQPAENYKNTQPIMDTDGSYFVYSKLNVQKSNWEAGNTFTCSVL | | | |
| | | HEGLHNHHTEKSLSHSPGK | | | |
| 820 | Construct JJ | APTSSSTSSSTAEAQQQQQQQQQQQQHLEQLLMDLQELLSRMENYRNLKLPRML | | fusion | |
| | | TFKFYLPKQATELKDLQCLEDELGPLRHVLDLTQSKSFQLEDAENFISNIRVTV | | protein | |
| | | VKLKGSDNTFECQFDDESATVVDFLRRWIAFCQSIISTSPQSLHERHLNNNGVR | | | |
| | | LGPGGGGGSGGGGSELCLYDPPEVPNATFKALSYKNGTILNCECKRGFRRLKEL | | | |
| | | VYMRCLGNSWSSNCQCTSNSHDKSRKQVTAQLEHQKEQQTTTDMQKPTQSMHQE | | | |
| | | NLTGHCREPPPWKHEDSKRIYHFVEGQSVHYECIPGYKALQRGPAISICKMKCG | | | |
| | | KTGWTQPQLTCVDEREHHRFLASEESQGSRNSSPESETSCPITTTDFPQPTETT | | | |
| | | AMTETFVLTMEYKGCKPCICTVPEVSSVFIFPPKPKDVLTITLTPKVTCVVVDI | | | |
| | | SKDDPEVQFSWFVDDVEVHTAQTQPREEQFNSTFRSVSELPIMHQDWLNGKEFK | | | |
| | | CRVNSAAFPAPIEKTISKTKGRPKAPQVYTIPPPKEQMAKDKVSLTCMITDFFP | | | |
| | | EDITVEWQWNGQPAENYKNTQPIMDTDGSYFVYSKLNVQKSNWEAGNTFTCSVL | | | |
| | | HEGLHNHHTEKSLSHSPGK | | | |
| 821 | Construct KK | APTSSSTSSSTAEAQQQQQQQQQQQQHLEQLLMDLQELLSRMENYRNLKLPRML | | fusion | |
| | | TFKFYLPKQATELKDLQCLEDELGPLRHVLDLTQSKSFQLEDAENFISNIRVTV | | protein | |
| | | VKLKGSDNTFECQFDDESATVVDFLRRWIAFCQSIISTSPQVRIQRKKEKMKET | | | |
| | | GVRLGPGGGGGSGGGGSELCLYDPPEVPNATFKALSYKNGTILNCECKRGFRRL | | | |
| | | KELVYMRCLGNSWSSNCQCTSNSHDKSRKQVTAQLEHQKEQQTTTDMQKPTQSM | | | |
| | | HQENLTGHCREPPPWKHEDSKRIYHFVEGQSVHYECIPGYKALQRGPAISICKM | | | |
| | | KCGKTGWTQPQLTCVDEREHHRFLASEESQGSRNSSPESETSCPITTTDFPQPT | | | |
| | | ETTAMTETFVLTMEYKGCKPCICTVPEVSSVFIFPPKPKDVLTITLTPKVTCVV | | | |
| | | VDISKDDPEVQFSWFVDDVEVHTAQTQPREEQFNSTFRSVSELPIMHQDWLNGK | | | |
| | | EFKCRVNSAAFPAPIEKTISKTKGRPKAPQVYTIPPPKEQMAKDKVSLTCMITD | | | |
| | | FFPEDITVEWQWNGQPAENYKNTQPIMDTDGSYFVYSKLNVQKSNWEAGNTFTC | | | |
| | | SVLHEGLHNHHTEKSLSHSPGK | | | |
| 822 | Construct LL | APTSSSTSSSTAEAQQQQQQQQQQQQHLEQLLMDLQELLSRMENYRNLKLPRML | | fusion | |
| | | TFKFYLPKQATELKDLQCLEDELGPLRHVLDLTQSKSFQLEDAENFISNIRVTV | | protein | |
| | | VKLKGSDNTFECQFDDESATVVDFLRRWIAFCQSIISTSPQSGGGGSGGGGGPL | | | |
| | | GVRGFHRRIKAGGSELCLYDPPEVPNATFKALSYKNGTILNCECKRGFRRLKEL | | | |
| | | VYMRCLGNSWSSNCQCTSNSHDKSRKQVTAQLEHQKEQQTTTDMQKPTQSMHQE | | | |
| | | NLTGHCREPPPWKHEDSKRIYHFVEGQSVHYECIPGYKALQRGPAISICKMKCG | | | |
| | | KTGWTQPQLTCVDEREHHRFLASEESQGSRNSSPESETSCPITTTDFPQPTETT | | | |
| | | AMTETFVLTMEYKGCKPCICTVPEVSSVFIFPPKPKDVLTITLTPKVTCVVVDI | | | |
| | | SKDDPEVQFSWFVDDVEVHTAQTQPREEQFNSTFRSVSELPIMHQDWLNGKEFK | | | |
| | | CRVNSAAFPAPIEKTISKTKGRPKAPQVYTIPPPKEQMAKDKVSLTCMITDFFP | | | |
| | | EDITVEWQWNGQPAENYKNTQPIMDTDGSYFVYSKLNVQKSNWEAGNTFTCSVL | | | |
| | | HEGLHNHHTEKSLSHSPGK | | | |
| 823 | Construct MM | APTSSSTSSSTAEAQQQQQQQQQQQQHLEQLLMDLQELLSRMENYRNLKLPRML | | fusion | |
| | | TFKFYLPKQATELKDLQCLEDELGPLRHVLDLTQSKSFQLEDAENFISNIRVTV | | protein | |
| | | VKLKGSDNTFECQFDDESATVVDFLRRWIAFCQSIISTSPQSGGGGSGGGGGVR | | | |
| | | LGPGFHRRIKAGGSELCLYDPPEVPNATFKALSYKNGTILNCECKRGFRRLKEL | | | |
| | | VYMRCLGNSWSSNCQCTSNSHDKSRKQVTAQLEHQKEQQTTTDMQKPTQSMHQE | | | |
| | | NLTGHCREPPPWKHEDSKRIYHFVEGQSVHYECIPGYKALQRGPAISICKMKCG | | | |
| | | KTGWTQPQLTCVDEREHHRFLASEESQGSRNSSPESETSCPITTTDFPQPTETT | | | |
| | | AMTETFVLTMEYKGCKPCICTVPEVSSVFIFPPKPKDVLTITLTPKVTCVVVDI | | | |
| | | SKDDPEVQFSWFVDDVEVHTAQTQPREEQFNSTFRSVSELPIMHQDWLNGKEFK | | | |
| | | CRVNSAAFPAPIEKTISKTKGRPKAPQVYTIPPPKEQMAKDKVSLTCMITDFFP | | | |
| | | EDITVEWQWNGQPAENYKNTQPIMDTDGSYFVYSKLNVQKSNWEAGNTFTCSVL | | | |
| | | HEGLHNHHTEKSLSHSPGK | | | |
| 824 | Construct NN | APTSSSTSSSTAEAQQQQQQQQQQQQHLEQLLMDLQELLSRMENYRNLKLPRML | | fusion | |
| | | TFKFYLPKQATELKDLQCLEDELGPLRHVLDLTQSKSFQLEDAENFISNIRVTV | | protein | |
| | | VKLKGSDNTFECQFDDESATVVDFLRRWIAFCQSIISTSPQSGGGGSGGGGGPL | | | |
| | | GVRGGHHPHGHHPHELCLYDPPEVPNATFKALSYKNGTILNCECKRGFRRLKEL | | | |
| | | VYMRCLGNSWSSNCQCTSNSHDKSRKQVTAQLEHQKEQQTTTDMQKPTQSMHQE | | | |
| | | NLTGHCREPPPWKHEDSKRIYHFVEGQSVHYECIPGYKALQRGPAISICKMKCG | | | |
| | | KTGWTQPQLTCVDEREHHRFLASEESQGSRNSSPESETSCPITTTDFPQPTETT | | | |
| | | AMTETFVLTMEYKGCKPCICTVPEVSSVFIFPPKPKDVLTITLTPKVTCVVVDI | | | |
| | | SKDDPEVQFSWFVDDVEVHTAQTQPREEQFNSTFRSVSELPIMHQDWLNGKEFK | | | |
| | | CRVNSAAFPAPIEKTISKTKGRPKAPQVYTIPPPKEQMAKDKVSLTCMITDFFP | | | |
| | | EDITVEWQWNGQPAENYKNTQPIMDTDGSYFVYSKLNVQKSNWEAGNTFTCSVL | | | |
| | | HEGLHNHHTEKSLSHSPGK | | | |
| 825 | Construct 00 | APTSSSTSSSTAEAQQQQQQQQQQQQHLEQLLMDLQELLSRMENYRNLKLPRML | | fusion | |
| | | TFKFYLPKQATELKDLQCLEDELGPLRHVLDLTQSKSFQLEDAENFISNIRVTV | | protein | |
| | | VKLKGSDNTFECQFDDESATVVDFLRRWIAFCQSIISTSPQSGGGGSGGGGGVR | | | |
| | | LGPGGHHPHGHHPHELCLYDPPEVPNATFKALSYKNGTILNCECKRGFRRLKEL | | | |
| | | VYMRCLGNSWSSNCQCTSNSHDKSRKQVTAQLEHQKEQQTTTDMQKPTQSMHQE | | | |
| | | NLTGHCREPPPWKHEDSKRIYHFVEGQSVHYECIPGYKALQRGPAISICKMKCG | | | |
| | | KTGWTQPQLTCVDEREHHRFLASEESQGSRNSSPESETSCPITTTDFPQPTETT | | | |
| | | AMTETFVLTMEYKGCKPCICTVPEVSSVFIFPPKPKDVLTITLTPKVTCVVVDI | | | |
| | | SKDDPEVQFSWFVDDVEVHTAQTQPREEQFNSTFRSVSELPIMHQDWLNGKEFK | | | |
| | | CRVNSAAFPAPIEKTISKTKGRPKAPQVYTIPPPKEQMAKDKVSLTCMITDFFP | | | |
| | | EDITVEWQWNGQPAENYKNTQPIMDTDGSYFVYSKLNVQKSNWEAGNTFTCSVL | | | |
| | | HEGLHNHHTEKSLSHSPGK | | | |
| 826 | Construct PP | APTSSSTSSSTAEAQQQQQQQQQQQQHLEQLLMDLQELLSRMENYRNLKLPRML | | fusion | |
| | | TFKFYLPKQATELKDLQCLEDELGPLRHVLDLTQSKSFQLEDAENFISNIRVTV | | protein | |
| | | VKLKGSDNTFECQFDDESATVVDFLRRWIAFCQSIISTSPQSGGGGSGGGGGPL | | | |
| | | GVRGGGWSHWGGSELCLYDPPEVPNATFKALSYKNGTILNCECKRGFRRLKELV | | | |
| | | YMRCLGNSWSSNCQCTSNSHDKSRKQVTAQLEHQKEQQTTTDMQKPTQSMHQEN | | | |
| | | LTGHCREPPPWKHEDSKRIYHFVEGQSVHYECIPGYKALQRGPAISICKMKCGK | | | |
| | | TGWTQPQLTCVDEREHHRFLASEESQGSRNSSPESETSCPITTTDFPQPTETTA | | | |
| | | MTETFVLTMEYKGCKPCICTVPEVSSVFIFPPKPKDVLTITLTPKVTCVVVDIS | | | |
| | | KDDPEVQFSWFVDDVEVHTAQTQPREEQFNSTFRSVSELPIMHQDWLNGKEFKC | | | |
| | | RVNSAAFPAPIEKTISKTKGRPKAPQVYTIPPPKEQMAKDKVSLTCMITDFFPE | | | |
| | | DITVEWQWNGQPAENYKNTQPIMDTDGSYFVYSKLNVQKSNWEAGNTFTCSVLH | | | |
| | | EGLHNHHTEKSLSHSPGK | | | |
| 827 | Construct QQ | APTSSSTSSSTAEAQQQQQQQQQQQQHLEQLLMDLQELLSRMENYRNLKLPRML | | fusion | |
| | | TFKFYLPKQATELKDLQCLEDELGPLRHVLDLTQSKSFQLEDAENFISNIRVTV | | protein | |
| | | VKLKGSDNTFECQFDDESATVVDFLRRWIAFCQSIISTSPQSGGGGSGGGGGVR | | | |
| | | LGPGGGWSHWGGSELCLYDPPEVPNATFKALSYKNGTILNCECKRGFRRLKELV | | | |
| | | YMRCLGNSWSSNCQCTSNSHDKSRKQVTAQLEHQKEQQTTTDMQKPTQSMHQEN | | | |
| | | LTGHCREPPPWKHEDSKRIYHFVEGQSVHYECIPGYKALQRGPAISICKMKCGK | | | |
| | | TGWTQPQLTCVDEREHHRFLASEESQGSRNSSPESETSCPITTTDFPQPTETTA | | | |
| | | MTETFVLTMEYKGCKPCICTVPEVSSVFIFPPKPKDVLTITLTPKVTCVVVDIS | | | |
| | | KDDPEVQFSWFVDDVEVHTAQTQPREEQFNSTFRSVSELPIMHQDWLNGKEFKC | | | |
| | | RVNSAAFPAPIEKTISKTKGRPKAPQVYTIPPPKEQMAKDKVSLTCMITDFFPE | | | |
| | | DITVEWQWNGQPAENYKNTQPIMDTDGSYFVYSKLNVQKSNWEAGNTFTCSVLH | | | |
| | | EGLHNHHTEKSLSHSPGK | | | |
| 828 | Construct RR | MGWSCIILFLVATATGVHSAPTSSSTSSSTAEAQQQQQQQQQQQQHLEQLLMDL | | fusion | |
| | | QELLSRMENYRNLKLPRMLTFKFYLPKQATELKDLQCLEDELGPLRHVLDLTQS | | protein | |
| | | KSFQLEDAENFISNIRVTVVKLKGSDNTFECQFDDESATVVDFLRRWIAFCQSI | | | |
| | | ISTSPQSGGGGSGGGGGPLGVRGKLWVLPKGGSELCLYDPPEVPNATFKALSYK | | | |
| | | NGTILNCECKRGFRRLKELVYMRCLGNSWSSNCQCTSNSHDKSRKQVTAQLEHQ | | | |
| | | KEQQTTTDMQKPTQSMHQENLTGHCREPPPWKHEDSKRIYHFVEGQSVHYECIP | | | |
| | | GYKALQRGPAISICKMKCGKTGWTQPQLTCVDEREHHRFLASEESQGSRNSSPE | | | |
| | | SETSCPITTTDFPQPTETTAMTETFVLTMEYKGCKPCICTVPEVSSVFIFPPKP | | | |
| | | KDVLTITLTPKVTCVVVDISKDDPEVQFSWFVDDVEVHTAQTQPREEQFNSTFR | | | |
| | | SVSELPIMHQDWLNGKEFKCRVNSAAFPAPIEKTISKTKGRPKAPQVYTIPPPK | | | |
| | | EQMAKDKVSLTCMITDFFPEDITVEWQWNGQPAENYKNTQPIMDTDGSYFVYSK | | | |
| | | LNVQKSNWEAGNTFTCSVLHEGLHNHHTEKSLSHSPGK | | | |
| 829 | Construct SS | MGWSCIILFLVATATGVHSAPTSSSTSSSTAEAQQQQQQQQQQQQHLEQLLMDL | | fusion | |
| | | QELLSRMENYRNLKLPRMLTFKFYLPKQATELKDLQCLEDELGPLRHVLDLTQS | | protein | |
| | | KSFQLEDAENFISNIRVTVVKLKGSDNTFECQFDDESATVVDFLRRWIAFCQSI | | | |
| | | ISTSPQSGGGGSGGGGGVRLGPGKLWVLPKGGSELCLYDPPEVPNATFKALSYK | | | |
| | | NGTILNCECKRGFRRLKELVYMRCLGNSWSSNCQCTSNSHDKSRKQVTAQLEHQ | | | |
| | | KEQQTTTDMQKPTQSMHQENLTGHCREPPPWKHEDSKRIYHFVEGQSVHYECIP | | | |
| | | GYKALQRGPAISICKMKCGKTGWTQPQLTCVDEREHHRFLASEESQGSRNSSPE | | | |
| | | SETSCPITTTDFPQPTETTAMTETFVLTMEYKGCKPCICTVPEVSSVFIFPPKP | | | |
| | | KDVLTITLTPKVTCVVVDISKDDPEVQFSWFVDDVEVHTAQTQPREEQFNSTFR | | | |
| | | SVSELPIMHQDWLNGKEFKCRVNSAAFPAPIEKTISKTKGRPKAPQVYTIPPPK | | | |
| | | EQMAKDKVSLTCMITDFFPEDITVEWQWNGQPAENYKNTQPIMDTDGSYFVYSK | | | |
| | | LNVQKSNWEAGNTFTCSVLHEGLHNHHTEKSLSHSPGK | | | |
| 830 | Construct TT | MGWSCIILFLVATATGVHSAPTSSSTSSSTAEAQQQQQQQQQQQQHLEQLLMDL | | fusion | |
| | | QELLSRMENYRNLKLPRMLTFKFYLPKQATELKDLQCLEDELGPLRHVLDLTQS | | protein | |
| | | KSFQLEDAENFISNIRVTVVKLKGSDNTFECQFDDESATVVDFLRRWIAFCQSI | | | |
| | | ISTSPQSGGGGSGGGGGPLGVRGLHERHLNNNGELCLYDPPEVPNATFKALSYK | | | |
| | | NGTILNCECKRGFRRLKELVYMRCLGNSWSSNCQCTSNSHDKSRKQVTAQLEHQ | | | |
| | | KEQQTTTDMQKPTQSMHQENLTGHCREPPPWKHEDSKRIYHFVEGQSVHYECIP | | | |
| | | GYKALQRGPAISICKMKCGKTGWTQPQLTCVDEREHHRFLASEESQGSRNSSPE | | | |
| | | SETSCPITTTDFPQPTETTAMTETFVLTMEYKGCKPCICTVPEVSSVFIFPPKP | | | |
| | | KDVLTITLTPKVTCVVVDISKDDPEVQFSWFVDDVEVHTAQTQPREEQFNSTFR | | | |
| | | SVSELPIMHQDWLNGKEFKCRVNSAAFPAPIEKTISKTKGRPKAPQVYTIPPPK | | | |
| | | EQMAKDKVSLTCMITDFFPEDITVEWQWNGQPAENYKNTQPIMDTDGSYFVYSK | | | |
| | | LNVQKSNWEAGNTFTCSVLHEGLHNHHTEKSLSHSPGK | | | |
| 831 | Construct UU | MGWSCIILFLVATATGVHSAPTSSSTSSSTAEAQQQQQQQQQQQQHLEQLLMDL | | fusion | |
| | | QELLSRMENYRNLKLPRMLTFKFYLPKQATELKDLQCLEDELGPLRHVLDLTQS | | protein | |
| | | KSFQLEDAENFISNIRVTVVKLKGSDNTFECQFDDESATVVDFLRRWIAFCQSI | | | |
| | | ISTSPQSGGGGSGGGGGVRLGPGLHERHLNNNGELCLYDPPEVPNATFKALSYK | | | |
| | | NGTILNCECKRGFRRLKELVYMRCLGNSWSSNCQCTSNSHDKSRKQVTAQLEHQ | | | |
| | | KEQQTTTDMQKPTQSMHQENLTGHCREPPPWKHEDSKRIYHFVEGQSVHYECIP | | | |
| | | GYKALQRGPAISICKMKCGKTGWTQPQLTCVDEREHHRFLASEESQGSRNSSPE | | | |
| | | SETSCPITTTDFPQPTETTAMTETFVLTMEYKGCKPCICTVPEVSSVFIFPPKP | | | |
| | | KDVLTITLTPKVTCVVVDISKDDPEVQFSWFVDDVEVHTAQTQPREEQFNSTFR | | | |
| | | SVSELPIMHQDWLNGKEFKCRVNSAAFPAPIEKTISKTKGRPKAPQVYTIPPPK | | | |
| | | EQMAKDKVSLTCMITDFFPEDITVEWQWNGQPAENYKNTQPIMDTDGSYFVYSK | | | |
| | | LNVQKSNWEAGNTFTCSVLHEGLHNHHTEKSLSHSPGK | | | |
| 832 | Construct VV | MGWSCIILFLVATATGVHSAPTSSSTSSSTAEAQQQQQQQQQQQQHLEQLLMDL | | fusion | |
| | | QELLSRMENYRNLKLPRMLTFKFYLPKQATELKDLQCLEDELGPLRHVLDLTQS | | protein | |
| | | KSFQLEDAENFISNIRVTVVKLKGSDNTFECQFDDESATVVDFLRRWIAFCQSI | | | |
| | | ISTSPQSGGGGGHHPHGPLGVRGGGGGSGGGGSELCLYDPPEVPNATFKALSYK | | | |
| | | NGTILNCECKRGFRRLKELVYMRCLGNSWSSNCQCTSNSHDKSRKQVTAQLEHQ | | | |
| | | KEQQTTTDMQKPTQSMHQENLTGHCREPPPWKHEDSKRIYHFVEGQSVHYECIP | | | |
| | | GYKALQRGPAISICKMKCGKTGWTQPQLTCVDEREHHRFLASEESQGSRNSSPE | | | |
| | | SETSCPITTTDFPQPTETTAMTETFVLTMEYKGCKPCICTVPEVSSVFIFPPKP | | | |
| | | KDVLTITLTPKVTCVVVDISKDDPEVQFSWFVDDVEVHTAQTQPREEQFNSTFR | | | |
| | | SVSELPIMHQDWLNGKEFKCRVNSAAFPAPIEKTISKTKGRPKAPQVYTIPPPK | | | |
| | | EQMAKDKVSLTCMITDFFPEDITVEWQWNGQPAENYKNTQPIMDTDGSYFVYSK | | | |
| | | LNVQKSNWEAGNTFTCSVLHEGLHNHHTEKSLSHSPGK | | | |
| 833 | Construct WW | MGWSCIILFLVATATGVHSAPTSSSTSSSTAEAQQQQQQQQQQQQHLEQLLMDL | | fusion | |
| | | QELLSRMENYRNLKLPRMLTFKFYLPKQATELKDLQCLEDELGPLRHVLDLTQS | | protein | |
| | | KSFQLEDAENFISNIRVTVVKLKGSDNTFECQFDDESATVVDFLRRWIAFCQSI | | | |
| | | ISTSPQGHHPHSGGGGGPLGVRGGGGGSGGGGSELCLYDPPEVPNATFKALSYK | | | |
| | | NGTILNCECKRGFRRLKELVYMRCLGNSWSSNCQCTSNSHDKSRKQVTAQLEHQ | | | |
| | | KEQQTTTDMQKPTQSMHQENLTGHCREPPPWKHEDSKRIYHFVEGQSVHYECIP | | | |
| | | GYKALQRGPAISICKMKCGKTGWTQPQLTCVDEREHHRFLASEESQGSRNSSPE | | | |
| | | SETSCPITTTDFPQPTETTAMTETFVLTMEYKGCKPCICTVPEVSSVFIFPPKP | | | |
| | | KDVLTITLTPKVTCVVVDISKDDPEVQFSWFVDDVEVHTAQTQPREEQFNSTFR | | | |
| | | SVSELPIMHQDWLNGKEFKCRVNSAAFPAPIEKTISKTKGRPKAPQVYTIPPPK | | | |
| | | EQMAKDKVSLTCMITDFFPEDITVEWQWNGQPAENYKNTQPIMDTDGSYFVYSK | | | |
| | | LNVQKSNWEAGNTFTCSVLHEGLHNHHTEKSLSHSPGK | | | |
| 834 | Construct XX | MGWSCIILFLVATATGVHSAPTSSSTSSSTAEAQQQQQQQQQQQQHLEQLLMDL | | fusion | |
| | | QELLSRMENYRNLKLPRMLTFKFYLPKQATELKDLQCLEDELGPLRHVLDLTQS | | protein | |
| | | KSFQLEDAENFISNIRVTVVKLKGSDNTFECQFDDESATVVDFLRRWIAFCQSI | | | |
| | | ISTSPQSGGGGSGGGGGPLGVRGGHHPHGGGGSELCLYDPPEVPNATFKALSYK | | | |
| | | NGTILNCECKRGFRRLKELVYMRCLGNSWSSNCQCTSNSHDKSRKQVTAQLEHQ | | | |
| | | KEQQTTTDMQKPTQSMHQENLTGHCREPPPWKHEDSKRIYHFVEGQSVHYECIP | | | |
| | | GYKALQRGPAISICKMKCGKTGWTQPQLTCVDEREHHRFLASEESQGSRNSSPE | | | |
| | | SETSCPITTTDFPQPTETTAMTETFVLTMEYKGCKPCICTVPEVSSVFIFPPKP | | | |
| | | KDVLTITLTPKVTCVVVDISKDDPEVQFSWFVDDVEVHTAQTQPREEQFNSTFR | | | |
| | | SVSELPIMHQDWLNGKEFKCRVNSAAFPAPIEKTISKTKGRPKAPQVYTIPPPK | | | |
| | | EQMAKDKVSLTCMITDFFPEDITVEWQWNGQPAENYKNTQPIMDTDGSYFVYSK | | | |
| | | LNVQKSNWEAGNTFTCSVLHEGLHNHHTEKSLSHSPGK | | | |
| 835 | Construct YY | MGWSCIILFLVATATGVHSAPTSSSTSSSTAEAQQQQQQQQQQQQHLEQLLMDL | | fusion | |
| | | QELLSRMENYRNLKLPRMLTFKFYLPKQATELKDLQCLEDELGPLRHVLDLTQS | | protein | |
| | | KSFQLEDAENFISNIRVTVVKLKGSDNTFECQFDDESATVVDFLRRWIAFCQSI | | | |
| | | ISTSPQSGGGGSGGGGGPLGVRGGGGGSGGGGSELCLYDPPEVPNATFKALSYK | | | |
| | | NGTILNCECKRGFRRLKELVYMRCLGNSWSSNCQCTSNSHDKSRKQVTAQLEHQ | | | |
| | | KEQQTTTDMQKPTQSMHQENLTGHCREPPPWKHEDSKRIYHFVEGQSVHYECIP | | | |
| | | GYKALQRGPAISICKMKCGKTGWTQPQLTCVDEREHHRFLASEESQGSRNSSPE | | | |
| | | SETSCPITTTDFPQPTETTAMTETFVLTMEYKGCKPCICTVPEVSSVFIFPPKP | | | |
| | | KDVLTITLTPKVTCVVVDISKDDPEVQFSWFVDDVEVHTAQTQPREEQFNSTFR | | | |
| | | SVSELPIMHQDWLNGKEFKCRVNSAAFPAPIEKTISKTKGRPKAPQVYTIPPPK | | | |
| | | EQMAKDKVSLTCMITDFFPEDITVEWQWNGQPAENYKNTQPIMDTDGSYFVYSK | | | |
| | | LNVQKSNWEAGNTFTCSVLHEGLHNHHTEKSLSHSPGKGHHPHGHHPH | | | |
| 836 | Construct ZZ | MGWSCIILFLVATATGVHSAPTSSSTSSSTAEAQQQQQQQQQQQQHLEQLLMDL | | fusion | |
| | | QELLSRMENYRNLKLPRMLTFKFYLPKQATELKDLQCLEDELGPLRHVLDLTQS | | protein | |
| | | KSFQLEDAENFISNIRVTVVKLKGSDNTFECQFDDESATVVDFLRRWIAFCQSI | | | |
| | | ISTSPQSGGGGSGGGGGPLGVRGGGGGSGGGGSELCLYDPPEVPNATFKALSYK | | | |
| | | NGTILNCECKRGFRRLKELVYMRCLGNSWSSNCQCTSNSHDKSRKQVTAQLEHQ | | | |
| | | KEQQTTTDMQKPTQSMHQENLTGHCREPPPWKHEDSKRIYHFVEGQSVHYECIP | | | |
| | | GYKALQRGPAISICKMKCGKTGWTQPQLTCVDEREHHRFLASEESQGSRNSSPE | | | |
| | | SETSCPITTTDFPQPTETTAMTETFVLTMEYKGCKPCICTVPEVSSVFIFPPKP | | | |
| | | KDVLTITLTPKVTCVVVDISKDDPEVQFSWFVDDVEVHTAQTQPREEQFNSTFR | | | |
| | | SVSELPIMHQDWLNGKEFKCRVNSAAFPAPIEKTISKTKGRPKAPQVYTIPPPK | | | |
| | | EQMAKDKVSLTCMITDFFPEDITVEWQWNGQPAENYKNTQPIMDTDGSYFVYSK | | | |
| | | LNVQKSNWEAGNTFTCSVLHEGLHNHHTEKSLSHSPGKGHHPH | | | |
| 837 | Construct I | APTSSSTKKTQLQLEHLLLDLQMILNGINNYKNPKLTRMLTFKFYMPKKATELK | | fusion | |
| | | HLQCLEEELKPLEEVLNLAQSKNFHLRPRDLISNINVIVLELKGSETTFMCEYA | | protein | |
| | | DETATIVEFLNRWITFSQSIISTLTSGGGGSGGGGGPLGVRGGGGGSGGGGSEL | | | |
| | | CDDDPPEIPHATFKAMAYKEGTILNCECKRGFRRIKSGSLYMLCTGNSSHSSWD | | | |
| | | NQCQCTSSATRNTTKQVTPQPEEQKERKTTEMQSPMQPVDQASLPGHCREPPPW | | | |
| | | ENEATERIYHFVVGQMVYYQCVQGYRALHRGPAESVCKMTHGKTRWTQPQLICT | | | |
| | | GEMETSQFPGEEKPQASPEGRPESETSCLVTTTDFQIQTEMAATMETSIFTTEY | | | |
| | | QDKTHTCPPCPAPELLGGPSVFLFPPKPKDTLMISRTPEVTCVVVDVSHEDPEV | | | |
| | | KFNWYVDGVEVHNAKTKPREEQYNSTYRVVSVLTVLHQDWLNGKEYKCKVSNKA | | | |
| | | LPAPIEKTISKAKGQPREPQVYTLPPSRDELTKNQVSLTCLVKGFYPSDIAVEW | | | |
| | | ESNGQPENNYKTTPPVLDSDGSFFLYSKLTVDKSRWQQGNVFSCSVMHEALHNH | | | |
| | | YTQKSLSLSPGHHHHHH | | | |
| 838 | Construct J | APTSSSTKKTQLQLEHLLLDLQMILNGINNYKNPKLTRMLTFKFYMPKKATELK | | fusion | |
| | | HLQCLEEELKPLEEVLNLAQSKNFHLRPRDLISNINVIVLELKGSETTFMCEYA | | protein | |
| | | DETATIVEFLNRWITFSQSIISTLTSGGGGSGGGGGPLGVRGGGGGSGGGGSEL | | | |
| | | CDDDPPEIPHATFKAMAYKEGTMLNCECKRGFRRIKSGSVYMLCTGNSSHSSWD | | | |
| | | NQCQCTSSATRNTTKQVTPQPEEQKERKTTEMQSPMQPVDQASLPGHCREPPPW | | | |
| | | ENEATERIYHFVVGQMVYYQCVQGYRALHRGPAESVCKMTHGKTRWTQPQLICT | | | |
| | | GEMETSQFPGEEKPQASPEGRPESETSCLVTTTDFQIQTEMAATMETSIFTTEY | | | |
| | | QDKTHTCPPCPAPELLGGPSVFLFPPKPKDTLMISRTPEVTCVVVDVSHEDPEV | | | |
| | | KFNWYVDGVEVHNAKTKPREEQYNSTYRVVSVLTVLHQDWLNGKEYKCKVSNKA | | | |
| | | LPAPIEKTISKAKGQPREPQVYTLPPSRDELTKNQVSLTCLVKGFYPSDIAVEW | | | |
| | | ESNGQPENNYKTTPPVLDSDGSFFLYSKLTVDKSRWQQGNVFSCSVMHEALHNH | | | |
| | | YTQKSLSLSPGHHHHHH | | | |
| 839 | Construct K | APTSSSTKKTQLQLEHLLLDLQMILNGINNYKNPKLTRMLTFKFYMPKKATELK | | fusion | |
| | | HLQCLEEELKPLEEVLNLAQSKNFHLRPRDLISNINVIVLELKGSETTFMCEYA | | protein | |
| | | DETATIVEFLNRWITFSQSIISTLTSGGGGSGGGGGPLGVRGGGGGSGGGGSEL | | | |
| | | CLYDPPEIPHATFKAMAYKEGTMLNCECKRGFRRIKSGSLYMLCTGNSSHSSWD | | | |
| | | NQCQCTSSATRNTTKQVTPQPEEQKERKTTEMQSPMQPVDQASLPGHCREPPPW | | | |
| | | ENEATERIYHFVVGQMVYYQCVQGYRALHRGPAESVCKMTHGKTRWTQPQLICT | | | |
| | | GEMETSQFPGEEKPQASPEGRPESETSCLVTTTDFQIQTEMAATMETSIFTTEY | | | |
| | | QDKTHTCPPCPAPELLGGPSVFLFPPKPKDTLMISRTPEVTCVVVDVSHEDPEV | | | |
| | | KFNWYVDGVEVHNAKTKPREEQYNSTYRVVSVLTVLHQDWLNGKEYKCKVSNKA | | | |
| | | LPAPIEKTISKAKGQPREPQVYTLPPSRDELTKNQVSLTCLVKGFYPSDIAVEW | | | |
| | | ESNGQPENNYKTTPPVLDSDGSFFLYSKLTVDKSRWQQGNVFSCSVMHEALHNH | | | |
| | | YTQKSLSLSPGHHHHHH | | | |
| 840 | Construct L | APTSSSTKKTQLQLEHLLLDLQMILNGINNYKNPKLTRMLTFKFYMPKKATELK | | fusion | |
| | | HLQCLEEELKPLEEVLNLAQSKNFHLRPRDLISNINVIVLELKGSETTFMCEYA | | protein | |
| | | DETATIVEFLNRWITFSQSIISTLTSGGGGSGGGGGPLGVRGGGGGSGGGGSEL | | | |
| | | CDDDPPEIPHATFKAMAYKEGTMLNCECKRGFRRIKELVYMLCTGNSSHSSWDN | | | |
| | | QCQCTSSATRNTTKQVTPQPEEQKERKTTEMQSPMQPVDQASLPGHCREPPPWE | | | |
| | | NEATERIYHFVVGQMVYYQCVQGYRALHRGPAESVCKMTHGKTRWTQPQLICTG | | | |
| | | EMETSQFPGEEKPQASPEGRPESETSCLVTTTDFQIQTEMAATMETSIFTTEYQ | | | |
| | | DKTHTCPPCPAPELLGGPSVFLFPPKPKDTLMISRTPEVTCVVVDVSHEDPEVK | | | |
| | | FNWYVDGVEVHNAKTKPREEQYNSTYRVVSVLTVLHQDWLNGKEYKCKVSNKAL | | | |
| | | PAPIEKTISKAKGQPREPQVYTLPPSRDELTKNQVSLTCLVKGFYPSDIAVEWE | | | |
| | | SNGQPENNYKTTPPVLDSDGSFFLYSKLTVDKSRWQQGNVFSCSVMHEALHNHY | | | |
| | | TQKSLSLSPGHHHHHH | | | |
| 841 | Construct M | APTSSSTKKTQLQLEHLLLDLQMILNGINNYKNPKLTRMLTFKFYMPKKATELK | | fusion | |
| | | HLQCLEEELKPLEEVLNLAQSKNFHLRPRDLISNINVIVLELKGSETTFMCEYA | | protein | |
| | | DETATIVEFLNRWITFSQSIISTLTSGGGGSGGGGGPLGVRGGGGGSGGGGSEL | | | |
| | | CDDDPPEIPHATFKAMAYKEGTMLNCECKRGFRRIKSGSLYMLCTGNSSHSSWD | | | |
| | | NQCQCTSSATRNTTKQVTPQPEEQKERKTTEMQSPMQPVDQASLPGHCREPPPW | | | |
| | | ENEATERIYHFVVGQMVYYQCVQGYRALHRGPAESVCKMTHGKTRWTQPQLICT | | | |
| | | GEMETSQFPGEEKPQASPEGRPESETSCDKTHTCPPCPAPELLGGPSVFLFPPK | | | |
| | | PKDTLMISRTPEVTCVVVDVSHEDPEVKFNWYVDGVEVHNAKTKPREEQYNSTY | | | |
| | | RVVSVLTVLHQDWLNGKEYKCKVSNKALPAPIEKTISKAKGQPREPQVYTLPPS | | | |
| | | RDELTKNQVSLTCLVKGFYPSDIAVEWESNGQPENNYKTTPPVLDSDGSFFLYS | | | |
| | | KLTVDKSRWQQGNVFSCSVMHEALHNHYTQKSLSLSPG | | | |
| 842 | Construct N | APTSSSTKKTQLQLEHLLLDLQMILNGINNYKNPKLTRMLTFKFYMPKKATELK | | fusion | |
| | | HLQCLEEELKPLEEVLNLAQSKNFHLRPRDLISNINVIVLELKGSETTFMCEYA | | protein | |
| | | DETATIVEFLNRWITFSQSIISTLTSGGGGSGGGGGPLGVRGGGGGSGGGGSEL | | | |
| | | CDDDPPEIPHATFKAMAYKEGTMLNCECKRGFRRIKSGSLYMLCTGNSSHSSWD | | | |
| | | NQCQCTSSATRNTTKQVTPQPEEQKERKTTEMQSPMQPVDQASLPGHCREPPPW | | | |
| | | ENEATERIYHFVVGQMVYYQCVQGYRALHRGPAESVCKMTHGKTRWTQPQLICT | | | |
| | | GEMETSQFPGEEKPQASPEGRPESETSCGSGGGGDKTHTCPPCPAPELLGGPSV | | | |
| | | FLFPPKPKDTLMISRTPEVTCVVVDVSHEDPEVKFNWYVDGVEVHNAKTKPREE | | | |
| | | QYNSTYRVVSVLTVLHQDWLNGKEYKCKVSNKALPAPIEKTISKAKGQPREPQV | | | |
| | | YTLPPSRDELTKNQVSLTCLVKGFYPSDIAVEWESNGQPENNYKTTPPVLDSDG | | | |
| | | SFFLYSKLTVDKSRWQQGNVFSCSVMHEALHNHYTQKSLSLSPG | | | |
| 843 | Construct O | APTSSSTKKTQLQLEHLLLDLQMILNGINNYKNPKLTRMLTFKFYMPKKATELK | | fusion | |
| | | HLQCLEEELKPLEEVLNLAQSKNFHLRPRDLISNINVIVLELKGSETTFMCEYA | | protein | |
| | | DETATIVEFLNRWITFSQSIISTLTSGGGGSGGGGGPLGVRGGGGGSGGGGSEL | | | |
| | | CDDDPPEIPHATFKAMAYKEGTILNCECKRGFRRIKSGSLYMLCTGNSSHSSWD | | | |
| | | NQCQCTSSATRNTTKQVTPQPEEQKERKTTEMQSPMQPVDQASLPGHCREPPPW | | | |
| | | ENEATERIYHFVVGQMVYYQCVQGYRALHRGPAESVCKMTHGKTRWTQPQLICT | | | |
| | | GEMETSQFPGEEKPQASPEGRPESETSCGSGGGGDKTHTCPPCPAPELLGGPSV | | | |
| | | FLFPPKPKDTLMISRTPEVTCVVVDVSHEDPEVKFNWYVDGVEVHNAKTKPREE | | | |
| | | QYNSTYRVVSVLTVLHQDWLNGKEYKCKVSNKALPAPIEKTISKAKGQPREPQV | | | |
| | | YTLPPSRDELTKNQVSLTCLVKGFYPSDIAVEWESNGQPENNYKTTPPVLDSDG | | | |
| | | SFFLYSKLTVDKSRWQQGNVFSCSVMHEALHNHYTQKSLSLSPG | | | |
| 844 | Construct P | APTSSSTKKTQLQLEHLLLDLQMILNGINNYKNPKLTRMLTFKFYMPKKATELK | | fusion | |
| | | HLQCLEEELKPLEEVLNLAQSKNFHLRPRDLISNINVIVLELKGSETTFMCEYA | | protein | |
| | | DETATIVEFLNRWITFSQSIISTLTSGGGGSGGGGGPLGVRGGGGGSGGGGSEL | | | |
| | | CDDDPPEIPHATFKAMAYKEGTMLNCECKRGFRRIKSGSVYMLCTGNSSHSSWD | | | |
| | | NQCQCTSSATRNTTKQVTPQPEEQKERKTTEMQSPMQPVDQASLPGHCREPPPW | | | |
| | | ENEATERIYHFVVGQMVYYQCVQGYRALHRGPAESVCKMTHGKTRWTQPQLICT | | | |
| | | GEMETSQFPGEEKPQASPEGRPESETSCGSGGGGDKTHTCPPCPAPELLGGPSV | | | |
| | | FLFPPKPKDTLMISRTPEVTCVVVDVSHEDPEVKFNWYVDGVEVHNAKTKPREE | | | |
| | | QYNSTYRVVSVLTVLHQDWLNGKEYKCKVSNKALPAPIEKTISKAKGQPREPQV | | | |
| | | YTLPPSRDELTKNQVSLTCLVKGFYPSDIAVEWESNGQPENNYKTTPPVLDSDG | | | |
| | | SFFLYSKLTVDKSRWQQGNVFSCSVMHEALHNHYTQKSLSLSPG | | | |
| 845 | Construct Q | APTSSSTKKTQLQLEHLLLDLQMILNGINNYKNPKLTRMLTFKFYMPKKATELK | | fusion | |
| | | HLQCLEEELKPLEEVLNLAQSKNFHLRPRDLISNINVIVLELKGSETTFMCEYA | | protein | |
| | | DETATIVEFLNRWITFSQSIISTLTSGGGGSGGGGGPLGVRGGGGGSGGGGSEL | | | |
| | | CLYDPPEIPHATFKAMAYKEGTMLNCECKRGFRRIKSGSLYMLCTGNSSHSSWD | | | |
| | | NQCQCTSSATRNTTKQVTPQPEEQKERKTTEMQSPMQPVDQASLPGHCREPPPW | | | |
| | | ENEATERIYHFVVGQMVYYQCVQGYRALHRGPAESVCKMTHGKTRWTQPQLICT | | | |
| | | GEMETSQFPGEEKPQASPEGRPESETSCGSGGGGDKTHTCPPCPAPELLGGPSV | | | |
| | | FLFPPKPKDTLMISRTPEVTCVVVDVSHEDPEVKFNWYVDGVEVHNAKTKPREE | | | |
| | | QYNSTYRVVSVLTVLHQDWLNGKEYKCKVSNKALPAPIEKTISKAKGQPREPQV | | | |
| | | YTLPPSRDELTKNQVSLTCLVKGFYPSDIAVEWESNGQPENNYKTTPPVLDSDG | | | |
| | | SFFLYSKLTVDKSRWQQGNVFSCSVMHEALHNHYTQKSLSLSPG | | | |
| 846 | Construct | APTSSSTKKTQLQLEHLLLDLQMILNGINNY | | fusion | |
| | AAA | KNPKLTRMLTFKFYMPKKATELKHLQCLEEELKPLEEVLNLAQSKNFHLR | | protein | |
| | | PRDLISNINVIVLELKGSETTFMCEYADETATIVEFLNRWITFSQSIIST | | | |
| | | LTSGGGGSGGGGGPLGVRGGGGGSGGGGSELCDDDPPEIPHATFKAMAYK | | | |
| | | EGTILNCECKRGFRRIKSGSLYMLCTGNSSHSSWDNQCQCTSSATRNTTK | | | |
| | | QVTPQPEEQKERKTTEMQSPMQPVDQASLPGHCREPPPWENEATERIYHF | | | |
| | | VVGQMVYYQCVQGYRALHRGPAESVCKMTHGKTRWTQPQLICTGEMETSQ | | | |
| | | FPGEEKPQASPEGRPESETSCLVTTTDFQIQTEMAATMETSIFTTEYQGS | | | |
| | | GGGGDKTHTCPPCPAPEAAGGPSVFLFPPKPKDTLMISRTPEVTCVVVDV | | | |
| | | SHEDPEVKFNWYVDGVEVHNAKTKPREEQYNSTYRVVSVLTVLHQDWLNG | | | |
| | | KEYKCKVSNKALPAPIEKTISKAKGQPREPQVYTLPPSRDELTKNQVSLT | | | |
| | | CLVKGFYPSDIAVEWESNGQPENNYKTTPPVLDSDGSFFLYSKLTVDKSR | | | |
| | | WQQGNVFSCSVMHEALHNHYTQKSLSLSPG | | | |
| 847 | Construct | APTSSSTKKTQLQLEHLLLDLQMILNGINNY | | fusion | |
| | BBB | KNPKLTRMLTFKFYMPKKATELKHLQCLEEELKPLEEVLNLAQSKNFHLR | | protein | |
| | | PRDLISNINVIVLELKGSETTFMCEYADETATIVEFLNRWITFSQSIIST | | | |
| | | LTSGGGGSGGGGGVRLGPGGGGGSGGGGSELCDDDPPEIPHATFKAMAYK | | | |
| | | EGTILNCECKRGFRRIKSGSLYMLCTGNSSHSSWDNQCQCTSSATRNTTK | | | |
| | | QVTPQPEEQKERKTTEMQSPMQPVDQASLPGHCREPPPWENEATERIYHF | | | |
| | | VVGQMVYYQCVQGYRALHRGPAESVCKMTHGKTRWTQPQLICTGEMETSQ | | | |
| | | FPGEEKPQASPEGRPESETSCLVTTTDFQIQTEMAATMETSIFTTEYQGS | | | |
| | | GGGGDKTHTCPPCPAPEAAGGPSVFLFPPKPKDTLMISRTPEVTCVVVDV | | | |
| | | SHEDPEVKFNWYVDGVEVHNAKTKPREEQYNSTYRVVSVLTVLHQDWLNG | | | |
| | | KEYKCKVSNKALPAPIEKTISKAKGQPREPQVYTLPPSRDELTKNQVSLT | | | |
| | | CLVKGFYPSDIAVEWESNGQPENNYKTTPPVLDSDGSFFLYSKLTVDKSR | | | |
| | | WQQGNVFSCSVMHEALHNHYTQKSLSLSPG | | | |
| 848 | Construct | APTSSSTKKTQLQLEHLLLDLQMILNGINNY | | fusion | |
| | CCC | KNPKLTRMLTFKFYMPKKATELKHLQCLEEELKPLEEVLNLAQSKNFHLR | | protein | |
| | | PRDLISNINVIVLELKGSETTFMCEYADETATIVEFLNRWITFSQSIIST | | | |
| | | LTGHHPHGHHPHGVRLGPGGGGGSGGGGSELCDDDPPEIPHATFKAMAYK | | | |
| | | EGTILNCECKRGFRRIKSGSLYMLCTGNSSHSSWDNQCQCTSSATRNTTK | | | |
| | | QVTPQPEEQKERKTTEMQSPMQPVDQASLPGHCREPPPWENEATERIYHF | | | |
| | | VVGQMVYYQCVQGYRALHRGPAESVCKMTHGKTRWTQPQLICTGEMETSQ | | | |
| | | FPGEEKPQASPEGRPESETSCLVTTTDFQIQTEMAATMETSIFTTEYQGS | | | |
| | | GGGGDKTHTCPPCPAPEAAGGPSVFLFPPKPKDTLMISRTPEVTCVVVDV | | | |
| | | SHEDPEVKFNWYVDGVEVHNAKTKPREEQYNSTYRVVSVLTVLHQDWLNG | | | |
| | | KEYKCKVSNKALPAPIEKTISKAKGQPREPQVYTLPPSRDELTKNQVSLT | | | |
| | | CLVKGFYPSDIAVEWESNGQPENNYKTTPPVLDSDGSFFLYSKLTVDKSR | | | |
| | | WQQGNVFSCSVMHEALHNHYTQKSLSLSPG | | | |
| 849 | Construct | APTSSSTKKTQLQLEHLLLDLQMILNGINNY | | fusion | |
| | DDD | KNPKLTRMLTFKFYMPKKATELKHLQCLEEELKPLEEVLNLAQSKNFHLR | | protein | |
| | | PRDLISNINVIVLELKGSETTFMCEYADETATIVEFLNRWITFSQSIIST | | | |
| | | LTGHHPHGHHPHGPLGVRGGGGGSGGGGSELCDDDPPEIPHATFKAMAYK | | | |
| | | EGTILNCECKRGFRRIKSGSLYMLCTGNSSHSSWDNQCQCTSSATRNTTK | | | |
| | | QVTPQPEEQKERKTTEMQSPMQPVDQASLPGHCREPPPWENEATERIYHF | | | |
| | | VVGQMVYYQCVQGYRALHRGPAESVCKMTHGKTRWTQPQLICTGEMETSQ | | | |
| | | FPGEEKPQASPEGRPESETSCLVTTTDFQIQTEMAATMETSIFTTEYQGS | | | |
| | | GGGGDKTHTCPPCPAPEAAGGPSVFLFPPKPKDTLMISRTPEVTCVVVDV | | | |
| | | SHEDPEVKFNWYVDGVEVHNAKTKPREEQYNSTYRVVSVLTVLHQDWLNG | | | |
| | | KEYKCKVSNKALPAPIEKTISKAKGQPREPQVYTLPPSRDELTKNQVSLT | | | |
| | | CLVKGFYPSDIAVEWESNGQPENNYKTTPPVLDSDGSFFLYSKLTVDKSR | | | |
| | | WQQGNVFSCSVMHEALHNHYTQKSLSLSPG | | | |
| 850 | Construct EEE | APTSSSTKKTQLQLEHLLLDLQMILNGINNY | | fusion | |
| | | KNPKLTRMLTFKFYMPKKATELKHLQCLEEELKPLEEVLNLAQSKNFHLR | | protein | |
| | | PRDLISNINVIVLELKGSETTFMCEYADETATIVEFLNRWITFSQSIIST | | | |
| | | LTVRIQRKKEKMKETGPLGVRGGGGGSGGGGSELCDDDPPEIPHATFKAMAYK | | | |
| | | EGTILNCECKRGFRRIKSGSLYMLCTGNSSHSSWDNQCQCTSSATRNTTK | | | |
| | | QVTPQPEEQKERKTTEMQSPMQPVDQASLPGHCREPPPWENEATERIYHF | | | |
| | | VVGQMVYYQCVQGYRALHRGPAESVCKMTHGKTRWTQPQLICTGEMETSQ | | | |
| | | FPGEEKPQASPEGRPESETSCLVTTTDFQIQTEMAATMETSIFTTEYQGS | | | |
| | | GGGGDKTHTCPPCPAPEAAGGPSVFLFPPKPKDTLMISRTPEVTCVVVDV | | | |
| | | SHEDPEVKFNWYVDGVEVHNAKTKPREEQYNSTYRVVSVLTVLHQDWLNG | | | |
| | | KEYKCKVSNKALPAPIEKTISKAKGQPREPQVYTLPPSRDELTKNQVSLT | | | |
| | | CLVKGFYPSDIAVEWESNGQPENNYKTTPPVLDSDGSFFLYSKLTVDKSR | | | |
| | | WQQGNVFSCSVMHEALHNHYTQKSLSLSPG | | | |
| 851 | Construct FFF | APTSSSTKKTQLQLEHLLLDLQMILNGINNY | | fusion | |
| | | KNPKLTRMLTFKFYMPKKATELKHLQCLEEELKPLEEVLNLAQSKNFHLR | | protein | |
| | | PRDLISNINVIVLELKGSETTFMCEYADETATIVEFLNRWITFSQSIIST | | | |
| | | LTVRIQRKKEKMKETGPLGVRGGGGGSGGGGSELCDDDPPEIPHATFKAMAYK | | | |
| | | EGTILNCECKRGFRRIKSGSLYMLCTGNSSHSSWDNQCQCTSSATRNTTK | | | |
| | | QVTPQPEEQKERKTTEMQSPMQPVDQASLPGHCREPPPWENEATERIYHF | | | |
| | | VVGQMVYYQCVQGYRALHRGPAESVCKMTHGKTRWTQPQLICTGEMETSQ | | | |
| | | FPGEEKPQASPEGRPESETSCLVTTTDFQIQTEMAATMETSIFTTEYQGS | | | |
| | | GGGGDKTHTCPPCPAPEAAGGPSVFLFPPKPKDTLMISRTPEVTCVVVDV | | | |
| | | SHEDPEVKFNWYVDGVEVHNAKTKPREEQYNSTYRVVSVLTVLHQDWLNG | | | |
| | | KEYKCKVSNKALPAPIEKTISKAKGQPREPQVYTLPPSRDELTKNQVSLT | | | |
| | | CLVKGFYPSDIAVEWESNGQPENNYKTTPPVLDSDGSFFLYSKLTVDKSR | | | |
| | | WQQGNVFSCSVMHEALHNHYTQKSLSLSPG | | | |
| 852 | Construct | APTSSSTSSSTAEAQQQQQQQQQQQQHLEQLLMDLQELLSRMENYRNLKL | | fusion | |
| | GGG | PRMLTFKFYLPKQATELKDLQCLEDELGPLRHVLDLTQSKSFQLEDAENF | | protein | |
| | | ISNIRVTVVKLKGSDNTFECQFDDESATVVDFLRRWIAFSQSIISTSPQS | | | |
| | | GGGGSGGGGGVRLGPGGGGGSGGGGSELCLYDPPEVPNATFKALSYKNGT | | | |
| | | ILNCECKRGFRRLKELVYMRCLGNSWSSNCQCTSNSHDKSRKQVTAQLEH | | | |
| | | QKEQQTTTDMQKPTQSMHQENLTGHCREPPPWKHEDSKRIYHFVEGQSVH | | | |
| | | YECIPGYKALQRGPAISICKMKCGKTGWTQPQLTCVDEREHHRFLASEES | | | |
| | | QGSRNSSPESETSCPITTTDFPQPTETTAMTETFVLTMEYKGCKPCICTV | | | |
| | | PEVSSVFIFPPKPKDVLTITLTPKVTCVVVDISKDDPEVQFSWFVDDVEV | | | |
| | | HTAQTQPREEQFNSTFRSVSELPIMHQDWLNGKEFKCRVNSAAFPAPIEK | | | |
| | | TISKTKGRPKAPQVYTIPPPKEQMAKDKVSLTCMITDFFPEDITVEWQWN | | | |
| | | GQPAENYKNTQPIMDTDGSYFVYSKLNVQKSNWEAGNTFTCSVLHEGLHN | | | |
| | | HHTEKSLSHSPGK | | | |

TABLE 2
Table of Targeting Sequences

| SEQ ID | | | | |
|---|---|---|---|---|
| NO | Sequence | Binds to | Note 1 | Note 2 |
| 180 | (TLTYTWS)n | denatured collagen IV | binding to MMP degraded collagen | |
| 181 | (CREKA)n | denatured collagen IV | binding to MMP degraded | inhibit tumor |
| | | | collagen | vasculature formation |
| 182 | (GXY)n | denatured Collagen | Gly = Glycine/X = | This peptide binds to |
| | | | Proline or modified | collagen |
| | | | Proline/Y = Proline | preteolytically |
| | | | or modified Proline | digested by MMP |
| 183 | GHCVTDSGVVYSVGMQ | denatured Collagen | from Fibronectin Domain | |
| | WLKTQGNKQMLCTCLG | | 1-6 | |
| | NGVSCQET | | | |
| 184 | EICTTNEGVMYRIGDQW | denatured Collagen | from Fibronectin Domain | |
| | DKQHDMGHMMRCTCV | | 1-7 | |
| | GNGRGEWTCIAY | | | |
| 185 | DQCIVDDITYNVNDTFH | denatured Collagen | from Fibronectin Domain | |
| | KRHEEGHMLNCTCFGQ | | 1-8 | |
| | GRGRWKCDPV | | | |
| 186 | DQCQDSETGTFYQIGDS | denatured Collagen | from Fibronectin Domain | |
| | WEKYVHGVRYQCYCYG | | 1-9 | |
| | RGIGEWHCQPL | | | |
| 187 | SNGEPCVLPFTYNGRTF | denatured Collagen | from Fibronectin Domain | |
| | YSCTTEGRQDGHLWCST | | 2-1 | |
| | TSNYEQDQKYSFCTD | | | |
| 188 | SNGALCHFPFLYNNHNY | denatured Collagen | from Fibronectin Domain | |
| | TDCTSEGRRDNMKWCG | | 2-2 | |
| | TTQNYDADQKFGFCPM | | | |
| 189 | RRANAALKAGELYKSIL | Collagen type I | Kd 0.86 uM//860 nM | Differential binding |
| | YGC | | | affinity to Collagen |
| 190 | RRANAALKAGELYKCIL | Collagen type I | Kd: 10 nM (tight | Differential binding |
| | YGC | | binding) | affinity to Collagen |
| 191 | MIVIELGTNPLKSSGIEN | Collagen type I | Kd 0.394 uM//394 nM | Differential binding |
| | GAFQGMKK | | | affinity to Collagen |
| 192 | LRELHLNNN | Collagen type I | Kd 0.17 uM//170 nM | Differential binding |
| | | | | affinity to Collagen |
| 193 | WREPSFCALS | Collagen type I | Kd 100 uM//100,000 nM | Differential binding |
| | | | | affinity to Collagen |
| 194 | TKKTLRT | Collagen type I | Kd ≤ 100 uM | Differential binding |
| | | | | affinity to Collagen |
| 195 | CPKESCNLFVLKD | Collagen type I | Kd 0.681 uM//681 nM | Differential binding |
| | | | | affinity to Collagen |
| 196 | WREPSFCALS | Collagen type I | Kd: 100 uM//100,000 nM | Differential binding |
| | | | | affinity to Collagen |
| 197 | HVWMQAPGGGK | Collagen type I | Kd 61 uM//61,000 nM | H-V-F/W-Q/M-Q-P/A-P/K |
| | | | | motif |
| 198 | HVWMQAPGGGC | Collagen type I | | |
| 199 | WYRGRL | Collagen type II | | |
| 200 | KLWVLPK | Collagen type IV | | |
| 201 | RRANAALKAGELYKSIL | Collagen | | |
| | Y | | | |
| 202 | GELYKSILY | Collagen | | |
| 203 | RRANAALKAGELYKCIL | Collagen | | |
| | Y | | | |
| 204 | GELYKCILY | Collagen | | |
| 205 | RLDGNEIKR | Collagen | | |
| 206 | AHEEISTTNEGVM | Collagen | | |
| 207 | NGVFKYRPRYFLYKHAY | Collagen | | |
| | FYPPLKRFPVQ | | | |
| 208 | CQDSETRTFY | Collagen | | |
| 209 | TKKTLRT | Collagen | | |
| 210 | GLRSKSKKFRRPDIQYPD | Collagen | | |
| | ATDEDITSHM | | | |
| 211 | SQNPVQP | Collagen | | |
| 212 | SYIRIADTNIT | Collagen | | |
| 213 | KELNLVYT | Collagen | | |
| 214 | GSIT | Collagen | | |
| 215 | GSITTIDVPWNV | Collagen | | |
| 216 | GQLYKSILY | Collagen | | |
| 217 | RRANAALKAGQLYKSIL | Collagen | | |
| | Y | | | |
| 218 | WREPSFCALS | Collagen | | |
| 219 | WHCTTKFPHHYCLY | Collagen | | |
| 220 | AHKCPWHLYTTHYCFT | Collagen | | |
| 221 | PAHKCPWHLYTHYCFT | Collagen | | |
| 222 | GROGER | Collagen | O is 4-hydroxyproline (see, Raynal, N., et | |
| | | | al., J. Biol. Chem., 2006, 281(7), 3821- | |
| | | | 3831) | |
| 223 | GMOGER | Collagen | O is 4-hydroxyproline (see, Raynal, N., et | |
| | | | al., J. Biol. Chem., 2006, 281(7), 3821- | |
| | | | 3831) | |
| 224 | GLOGEN | Collagen | O is 4-hydroxyproline (see, Raynal, N., et | |
| | | | al., J. Biol. Chem., 2006, 281(7), 3821- | |
| | | | 3831) | |
| 225 | GLOGER | Collagen | O is 4-hydroxyproline (see, Raynal, N., et | |
| | | | al., J. Biol. Chem., 2006, 281(7), 3821- | |
| | | | 3831) | |
| 226 | GLKGEN | Collagen | O is 4-hydroxyproline (see, Raynal, N., et | |
| | | | al., J. Biol. Chem., 2006, 281(7), 3821- | |
| | | | 3831) | |
| 227 | GFOGERGVEGPOGPA | Collagen | O is 4-hydroxyproline (see, Raynal, N., et | |
| | | | al., J. Biol. Chem., 2006, 281(7), 3821- | |
| | | | 3831) | |
| 228 | WREPSFCALS | Collagen | | Takagi, J., et al, |
| | | | | Biochemistry, 1992, |
| | | | | 31, 8530-8534 |
| 229 | WYRGRL | Collagen | | Rothenfluh D.A., et |
| | | | | al, Nat Mater. 2008, |
| | | | | 7(3), 748-54 |
| 230 | WTCSGDEYTWHC | Collagen | | |
| 231 | WTCVGDHKTWKC | Collagen | | |
| 232 | QWHCTTRFPHHYCLYG | Collagen | | U.S. 2007/0293656) |
| 233 | STWTWNGSAWTWNEG | Collagen | | |
| | GK | | | |
| 234 | STWTWNGTNWTRNDGG | Collagen | | WO/2014/059530 |
| | K | | | |
| 235 | CVWLWEQC | Collagen | | |
| 236 | CMTSPWRC | Collagen | | Vanhoorelbeke, K., et |
| | | | | al, J. Biol. Chem., |
| | | | | 2003, 278, 37815- |
| | | | | 37821 |
| 237 | CPGRVMHGLHLGDDEG | Collagen | | Muzzard, J., et al, |
| | PC | | | PLoS one. 4(e5585) |
| | | | | I- 10) |
| 238 | KLWLLPK | Collagen | | Chan, J. M., et al, |
| | | | | Proc Natl Acad Sci |
| | | | | U.S.A., 2010, 107, |
| | | | | 2213-2218) |
| 239 | CQDSETRTFY | Collagen | | U.S. 2013/0243700 |
| 240 | LSELRLHEN | Collagen | | Fredrico, S., Angew. |
| | | | | Chem. Int. Ed. 2015, |
| | | | | 37, 10980-10984 |
| 241 | LTELHLDNN | Collagen | | Fredrico, S., Angew. |
| | | | | Chem. Int. Ed. 2015, |
| | | | | 37, 10980-10985 |
| 242 | LSELRLHNN | Collagen | | Fredrico, S., Angew. |
| | | | | Chem. Int. Ed. 2015, |
| | | | | 37, 10980-10986 |
| 243 | LSELRLHAN | Collagen | | Fredrico, S., Angew. |
| | | | | Chem. Int. Ed. 2015, |
| | | | | 37, 10980-10987 |
| 244 | LRELHLNNN | Collagen | | Fredrico, S., Angew. |
| | | | | Chem. Int. Ed. 2015, |
| | | | | 37, 10980-10988 |
| 245 | RVMHGLHLGDDE | Collagen | | |
| 246 | RVMHGLHLGNNQ | Collagen | | |
| 747 | RVMHGLHLGNNQ | Collagen | | |
| 748 | GQLYKSILYGSG-4K2K | Collagen | (a 4-branch peptide) which can be conjugated | |
| | | | to a fusion polypeptide | |
| 749 | GSGQLYKSILY | Collagen | | |
| 250 | GSGGQLYKSILY | Collagen | | |
| 251 | KQLNLVYT | Collagen | | |
| 252 | CVWLWQQC | Collagen | | |
| 253 | WREPSFSALS | Collagen | | |
| 254 | GHRPLDKKREEAPSLRP | Collagen | | |
| | APPPISGGGYR | | | |
| 255 | GHRPLNKKRQQ | Collagen | | |
| | APSLRPAPPPISGGGYR | | | |
| 256 | GELYKSILYGSG | Collagen | | |
| 257 | GQLYKSILYGSG | Collagen | | |
| 258 | RYPISRPRKRGSG | Collagen | | |
| 259 | GELYKSILYGC | Collagen | | |
| 260 | RLDGNEIKRGC | Collagen | | |
| 261 | AHEEISTTNEGVMGC | Collagen | | |
| 262 | GCGGELYKSILY | Collagen | | |
| 263 | NGVFKYRPRYFLYKHAY | Collagen | | |
| | FYPPLKRFPVQGC | | | |
| 264 | CQDSETRTFYGC | Collagen | | |
| 265 | TKKTLRTGC | Collagen | | |
| 266 | GLRSKSKKFRRPDIQYPD | Collagen | | |
| | ATDEDITSHMGC | | | |
| 267 | SQNPVQPGC | Collagen | | |
| 268 | SYIRIADTNITGC | Collagen | | |
| 269 | KELNLVYTGC | Collagen | | |
| 270 | GSITTIDVPWNVGC | Collagen | | |
| 271 | GCGGELYKSILYGC | Collagen | | |
| 272 | RRANAALKAGELYKSIL | Collagen | | |
| | YGSG | | | |
| 273 | cyclic CVWLWENC | Collagen | cyclic peptides can be conjugated to a fusion | |
| | | | polypeptide | |
| 274 | cyclic CVWLWEQC | Collagen | cyclic peptides can be | Depraetere H., et al, |
| | | | conjugated to a fusion | Blood. 1998, 92, 4207- |
| | | | polypeptide | 421 1; and Duncan R., |
| | | | | Nat Rev Drug Discov, |
| | | | | 2003, 2(5), 347-360 |
| 275 | D-amino acid | Collagen | D-amino acid-containing peptides can be conjugated | |
| | EDDGLHLGHMVR | | to ODC | |
| 276 | D-amino acid | Collagen | D-amino acid-containing peptides can be conjugated | |
| | QNNGLHLGHMVR | | to ODC | |
| 277 | PPTDLRFTNIGPDTMRVT | integrin | from Fibronectin Domain III-9 | |
| | WAPPPSIDLTNFLVRYSP | | | |
| | VKNEEDVAELSISPSDNA | | | |
| | VVLTNLLPGTEYVVSVS | | | |
| | SVYEQHESTPLRGRQKT | | | |
| | GLDSP | | | |
| 278 | TGIDFSDITANSFTVHWI | integrin | from Fibronectin Domain III-10 | |
| | APRATITGYRIRHHPEHF | | | |
| | SGRPREDRVPHSRNSITL | | | |
| | TNLTPGTEYVVSIVALN | | | |
| | GREESPLLIGQQSTVSD | | | |
| 279 | PGCYDNGKHYQINQQW | integrin | from Fibronectin Domain | |
| | ERTYLGNALVCTCYGGS | | 1-1 | |
| | RGFNCESK | | | |
| 280 | ETCFDKYTGNTYRVGDT | integrin | from Fibronectin Domain | |
| | YERPKDSMIWDCTCIGA | | 1-2 | |
| | GRGRISCTIA | | | |
| 281 | NRCHEGGQSYKIGDTWR | integrin | from Fibronectin Domain | |
| | RPHETGGYMLECVCLGN | | 1-3 | |
| | GKGEWTCKPI | | | |
| 282 | EKCFDHAAGTSYVVGET | integrin | from Fibronectin Domain | |
| | WEKPYQGWMMVDCTC | | 1-4 | |
| | LGEGSGRITCTSR | | | |
| 283 | NRCNDQDTRTSYRIGDT | integrin | from Fibronectin Domain | |
| | WSKKDNRGNLLQCICTG | | 1-5 | |
| | NGRGEWKCERH | | | |
| 284 | GHCVTDSGVVYSVGMQ | denatured Collagen/ | from Fibronectin Domain | duplicated in collagen |
| | WLKTQGNKQMLCTCLG | integrin | 1-6 | |
| | NGVSCQET | | | |
| 285 | EICTTNEGVMYRIGDQW | denatured Collagen/ | from Fibronectin Domain | duplicated in collagen |
| | DKQHDMGHMMRCTCV | integrin | 1-7 | |
| | GNGRGEWTCIAY | | | |
| 286 | DQCIVDDITYNVNDTFH | denatured Collagen/ | from Fibronectin Domain | duplicated in collagen |
| | KRHEEGHMLNCTCFGQ | integrin | 1-8 | |
| | GRGRWKCDPV | | | |
| 287 | DQCQDSETGTFYQIGDS | denatured Collagen/ | from Fibronectin Domain | duplicated in collagen |
| | WEKYVHGVRYQCYCYG | integrin | 1-9 | |
| | RGIGEWHCQPL | | | |
| 288 | APTDLKFTQVTPTSLSAQ | integrin | from Fibronectin Domain | |
| | WTPPNVQLTGYRVRVTP | | III-14 | |
| | KEKTGPMKEINLAPDSSS | | | |
| | VVVSGLMVATKYEVSV | | | |
| | YALKDTLTSRPAQGVVT | | | |
| | TLENVSPP | | | |
| 289 | APTNLQFVNETDSTVLV | integrin | from Fibronectin Domain | |
| | RWTPPRAQITGYRLTVG | | III-5 | |
| | LTRRGQPRQYNVGPSVS | | | |
| | KYPLRNLQPASEYTVSL | | | |
| | VAIKGNQESPKATGVFT | | | |
| | TLQPG | | | |
| 290 | KGHRGF | integrin | Derived from Collagen I | |
| 291 | GFPGER | integrin | Derived from Collagen I | |
| 292 | GTPGPQGIAGQRDVV | integrin | Derived from Collagen alpha1(I) | |
| 293 | EKGPD | integrin | Derived from Collagen II | |
| 294 | EKGPDP | integrin | Derived from Collagen II | |
| 295 | EKGPDPL | integrin | Derived from Collagen II | |
| 296 | TAGSCLRKFSTM | integrin | Derived from Collagen IV | |
| 297 | TAIPSCPEGTVPLYS | integrin | Derived from Collagen alpha3(IV)-NC1 | |
| 298 | TDIPPCPHGWISLWK | integrin | Derived from Collagen IV | |
| 299 | PHSRN | integrin | Derived from Fibronectin | |
| 300 | RGD | integrin | Derived from Fibronectin | |
| 301 | GRGDSP | integrin | Derived from Fibronectin | |
| 302 | YRVRVTPKEKTGPMKE | integrin | Derived from Fibronectin | |
| 303 | SPPRRARVT | integrin | Derived from Fibronectin | |
| 304 | WQPPRARI | integrin | Derived from Fibronectin | |
| 305 | KNNQKSEPLIGRKKT | integrin | Derived from Fibronectin | |
| 306 | EILDVPST | integrin | Derived from Fibronectin | |
| 307 | REDV | integrin | Derived from Fibronectin | |
| 308 | RQVFQVAYIIIKA | integrin | Derived from Laminin Alpha-1 chain | |
| 309 | SINNTAVMQRLT | integrin | Derived from Laminin Alpha-1 chain | |
| 310 | IKVAV | integrin | Derived from Laminin Alpha-1 chain | |
| 311 | NRWHSIYITRFG | integrin | Derived from Laminin Alpha-1 chain | |
| 312 | TWYKIAFQRNRK | integrin | Derived from Laminin Alpha-1 chain | |
| 313 | RKRLQVQLSIRT | integrin | Derived from Laminin Alpha-1 chain | |
| 314 | KNRLTIELEVRT | integrin | Derived from Laminin Alpha-2 chain | |
| 315 | SYWYRIEASRTG | integrin | Derived from Laminin Alpha-2 chain | |
| 316 | DFGTVQLRNGFPFFSYD | integrin | Derived from Laminin Alpha-2 chain | |
| | LG | | | |
| 317 | GQLFHVAYILIKF | integrin | Derived from Laminin Alpha-3 chain | |
| 318 | KNSFMALYLSKG | integrin | Derived from Laminin Alpha-3 chain | |
| 319 | TLFLAHGRLVFM | integrin | Derived from Laminin Alpha-4 chain | |
| 320 | GQVFHVAYVLIKF | integrin | Derived from Laminin Alpha-5 chain | |
| 321 | GIIFFL | integrin | Derived from Laminin Alpha-5 chain | |
| 322 | LALFLSNGHFVA | integrin | Derived from Laminin Alpha-5 chain | |
| 323 | RYVVLPR | integrin | Derived from Laminin Beta-1 chain | |
| 324 | PDSGR | integrin | Derived from Laminin Beta-1 chain | |
| 325 | YIGSR | integrin | Derived from Laminin Beta-1 chain | |
| 326 | KAFDITYVRLKF | integrin | Derived from Laminin Gamma-1 chain | |
| 327 | RNIAEIIKDI | integrin | Derived from Laminin Gamma-1 chain | |
| 328 | FRHRNRKGY | integrin | Derived from Vitronectin | |
| 329 | KKQRFRHRNRKGYRSQ | integrin | Derived from Vitronectin | |
| 330 | FHRRIKA | integrin | Derived from Sialoprotein | |
| 331 | KRSR | integrin | Derived from Sialoprotein | |
| 332 | GLPGER | α1β1, α2β1 | Derived from Collagen α1(I) 7S | |
| 333 | GFPGER | α1β1, α2β1 | Derived from Collagen alpha1(I) | |
| 334 | GLSGER | α2β1 | Derived from Collagen alpha1(I) | |
| 335 | DGEA | α2β1 | Derived from Collagen alpha1(I) | |
| 336 | GPAGKDGEAGAQG | α2β1 | Derived from Collagen alpha1(I) | |
| 337 | GPKGAAGEPGKP | α1β1, α3β1 | Derived from Collagen alpha1(I) | |
| 338 | GAPGPKGARGSA | α1β1, α3β1 | Derived from Collagen alpha1(I) | |
| 339 | GPQGIAGQRGVVGLP | α1β1 | Derived from Collagen alpha1(I) | |
| 340 | PKGQKGEKG | Poly(I) | Derived from Collagen alpha1(I) | |
| 341 | GASGER | α2β1 | Derived from Collagen alpha1(I) | |
| 342 | GQRGER | α2β1 | Derived from Collagen alpha1(I) | |
| 343 | GMPGER | integrin | Derived from Collagen alpha1(I) | |
| 344 | RGQPGVMGF | VWF | Derived from Collagen alpha1(III) | |
| 345 | GKDGES | α2β1 | Derived from Collagen alpha1(III) | |
| 346 | GLKGEN | α2β1 | Derived from Collagen alpha1(III) | |
| 347 | GLPGEN | α2β1 | Derived from Collagen alpha1(III) | |
| 348 | GLPGEA | α2β1 | Derived from Collagen alpha1(III) | |
| 349 | GPPGDQGPPGIP | α1β1 | Derived from Collagen alpha1(IV) | |
| 350 | GAKGRAGFPGLP | α1β1 | Derived from Collagen alpha1(IV) | |
| 351 | MFKKPTPSTLKAGELR | integrin | Derived from Collagen alpha1(IV) | |
| 352 | GFPGSRGDTGPP | integrin | Derived from Collagen alpha1(IV) | |
| 353 | GVKGDKGNPGWPGAP | integrin | Derived from Collagen alpha1(IV) | |
| 354 | FYFDLR | α1β1, α2β1 | Derived from Collagen alpha1(IV) | |
| 355 | MFKKPTPSTLKAGELR | integrin | Derived from Collagen alpha1(IV) | |
| 356 | GFPGSRGDTGPP | integrin | Derived from Collagen alpha1(IV) | |
| 357 | GVKGDKGNPGWPGAP | integrin | Derived from Collagen alpha1(IV) | |
| 358 | FYFDLR | α1β1, α2β1 | Derived from Collagen alpha1(IV) | |
| 359 | RGQPGVPGVPGMKGD | integrin | Derived from Collagen alpha2(IV) | |
| 360 | TDIPPCPHGWISLWK | integrin | Derived from Collagen alpha3(IV)-NC1 | |
| 361 | MNYYSNS | integrin | Derived from Collagen alpha3(IV)-NC1 | |
| 362 | CNYYSNSYSFWLASLNP | integrin | Derived from Collagen alpha3(IV)-NC1 | |
| | ER | | | |
| 363 | ISRCQVCMKKRH | integrin | Derived from Collagen alpha3(IV)-NC1 | |
| 364 | TLGSCLQRFTTM | integrin | Derived from Collagen alpha3(IV)-NC1 | |
| 365 | GRRGKT | integrin | Derived from Collagen alpha3(IV)-NC1 | |
| 366 | RGQPGRKGL | integrin | Derived from Collagen alpha3(IV)-NC1 | |
| 367 | MFRKPIPSTVKA | integrin | Derived from Collagen alpha3(IV)-NC1 | |
| 368 | IISRCQVCMKMRP | integrin | Derived from Collagen alpha3(IV)-NC1 | |
| 369 | LAGSCLPVFSTL | integrin | Derived from Collagen alpha4(IV)-NC1 | |
| 370 | TAGSCLRRFSTM | integrin | Derived from Collagen alpha5(IV)-NC1 | |
| 371 | NKRAHG | integrin | Derived from Collagen alpha5(IV)-NC2 | |
| 372 | WTPPRAQITGYRLTVGL | α5β1 | Derived from Fibronectin III-5 | |
| | TRR | | | |
| 373 | KLDAPT | α4β1, α4β7 | Derived from Fibronectin III-5 | |
| 374 | PHSRN | α5β1 | Derived from Fibronectin III-9 | |
| 375 | RGD | α5β1, αvβ3 | Derived from Fibronectin III-10 | |
| 376 | RGDS | αIIbβ3 | Derived from Fibronectin III-10 | |
| 377 | GRGDSP | α5β1 | Derived from Fibronectin III-10 | |
| 378 | EDGIHEL | α4β1, α9β1 | Derived from Fibronectin EDA | |
| 379 | PRARITGYIIKYEKPGSPP | integrin | Derived from Fibronectin III-14 | |
| | REVVPRPRPGV | | | |
| 380 | IDAPS | α4β1 | Derived from Fibronectin IIICS-1 | |
| 381 | VVIDASTAIDAPSNL | α4β1 | Derived from Fibronectin IIICS-1 | |
| 382 | LDVPS | α4β1 | Derived from Fibronectin IIICS-1 | |
| 383 | REDV | α4β1 | Derived from Fibronectin IIICS-5 | |
| 384 | PHSRN-RGDSP | α5β1 | Derived from Fibronectin III-10 | |
| 385 | PLDREAIAKY | integrin | Derived from E-Cadherin EC1 | |
| 386 | HAVDI | integrin | Derived from E-Cadherin EC1, groove | |
| 387 | LFSHAVSSNG | integrin | Derived from E-Cadherin EC1, groove | |
| 388 | ADTPPV | integrin | Derived from E-Cadherin EC1, bulge | |
| 389 | QGADTPPVGV | integrin | Derived from E-Cadherin EC1, bulge | |
| 390 | PLDREAIAKY | integrin | Derived from E-Cadherin EC1 | |
| 391 | DQNDN | integrin | Derived from E-Cadherin EC1 | |
| 392 | HAVDI | integrin | Derived from E-Cadherin EC1 | |
| 393 | LRAHAVDING | integrin | Derived from E-Cadherin EC1 | |
| 394 | LRAHAVDVNG | integrin | Derived from E-Cadherin EC1 | |
| 395 | VITVKDINDN | integrin | Derived from E-Cadherin EC2 | |
| 396 | GLDRESYPYY | integrin | Derived from E-Cadherin EC2 | |
| 397 | MKVSATDADD | integrin | Derived from E-Cadherin EC2 | |
| 398 | QDPELPDKNM | integrin | Derived from E-Cadherin EC2, bulge | |
| 399 | LVVQAADLQG | integrin | Derived from E-Cadherin EC2, groove | |
| 400 | NDDGGQFVVT | integrin | Derived from E-Cadherin EC3, bulge | |
| 401 | LVVQAADLQG | integrin | Derived from E-Cadherin EC2, groove | |
| 402 | TYRIWRDTAN | integrin | Derived from E-Cadherin EC4, bulge | |
| 403 | YILHVAVTNY | integrin | Derived from E-Cadherin EC3, groove | |
| 404 | YTALIIATDN | integrin | Derived from E-Cadherin EC4, groove | |
| 405 | QDPELPDKNM | integrin | Derived from E-Cadherin EC2, bulge | |
| 406 | RGDV | αvβ3, αvβ5 | Somatomedin B | |
| 407 | PQVTRGDVFTMP | αvβ3, αvβ5 | Somatomedin B | |
| 408 | LNRQELFPFG | integrin | Nidogen G2 | |
| 409 | SIGFRGDGQTC | integrin | Nidogen G2 | |
| 410 | TWSKVGGHLRPGIVQSG | IgB | Perlecan IV | |
| 411 | VAEIDGIEL | α9β1 | Tenascin-C | |
| 412 | VFDNFVLK | α7β1 | Tenascin-C | |
| 413 | VGVAPG | integrin | Elastin | |
| 414 | PGVGV | integrin | Elastin | |
| 415 | TTSWSQCSKS | α6β1 | CCN-1 | |
| 416 | SVVYGLR | α9β1 | Osteopontin | |
| 417 | DGRGDSVAYG | αvβ3 | Osteopontin | |
| 418 | LALERKDHSG | α6β1 | Thrombospondin | |
| 419 | RGDF | αIIIbβ3 | Fibrinogen | |
| 420 | KRLDGSV | αMβ2 | Fibrinogen | |
| 421 | HHLGGAKQAGDV | αIIbβ3 | Fibrinogen | |
| 422 | YSMKKTTMKIIPFNRLTI | αIIbβ3 | Fibrinogen | |
| | G | | | |
| 423 | GVYYQGGTYSKAS | αMβ2 | Fibrinogen | |
| 424 | LWVTVRSQQRGLF | α5β1 | Laminin α1 LN (A3) | |
| 425 | GTNNWWQSPSIQN | α4β1, α4β7 | Laminin α1 LN (A10) | |
| 426 | WVTVTLDLRQVFQ | α5β1 | Laminin α1 LN (A12) | |
| 427 | RQVFQVAYIIIKA | α1β1, α2β1 | Laminin α1 LN (A13) | |
| 428 | LTRYKITPRRGPPT | α5β1 | Laminin α1 LN (A18) | |
| 429 | LLEFTSARYIRL | integrin | Laminin Laminin α1 LN (A24) | |
| 430 | YIRLRLQRIRTL | integrin | Laminin α1 LN (A25) | |
| 431 | RRYYYSIKDISV | integrin | Laminin α1 V? (A29) | |
| 432 | GGFLKYTVSYDI | integrin | Laminin α1 L4a (A55) | |
| 433 | RDQLMTVLANVT | integrin | Laminin α1 L4a (A64) | |
| 434 | VLIKGGRARKHV | α5β1 | Laminin α1 L4a (A112) | |
| 435 | NLLLLLVKANLK | integrin | Laminin α1 L1 (A167) | |
| 436 | HRDELLLWARKI | integrin | Laminin α1 L1 (A174) | |
| 437 | KRRARDLVHRAE | integrin | Laminin α1 L1 (A177) | |
| 438 | SQFQESVDNITK | integrin | Laminin α1 L1 (A191) | |
| 439 | PGGMREKGRKAR | integrin | Laminin α1 L1 (A194) | |
| 440 | MEMQANLLLDRL | integrin | Laminin α1 L1 (A203) | |
| 441 | LSEIKLLISRAR | integrin | Laminin α1 L1 (A206) | |
| 442 | IKVAV | αvβ3 | Laminin α1 L1 (A208) | |
| 443 | AASIKVAVSADR | αvβ3 | Laminin α1 L1 (A208) | |
| 444 | NRWHSIYITRFG | α6β1 | Laminin α1 LG1 (AG10) | |
| 445 | SSFHFDGSGYAM | integrin | Laminin α1 LG2 (AG22) | |
| 446 | IAFQRN | α6β1 | Laminin α1 LG2 (AG32) | |
| 447 | TWYKIAFQRNRK | α6β1 | Laminin α1 LG2 (AG32) | |
| 448 | SLVRNRRVITIQ | integrin | Laminin α1 LG2 (AG56) | |
| 449 | DYATLQLQEGRLHFMFD | α2β1 | Laminin EF-1 | |
| | LG | | | |
| 450 | KKGSYNNIVVHV | integrin | Laminin α2 LG (A2G2) | |
| 451 | ADNLLFYLGSAK | integrin | Laminin α2 LG (A2G4) | |
| 452 | GSAKFIDFLAIE | integrin | Laminin α2 LG (A2G5) | |
| 453 | KVSFLWWVGSGV | integrin | Laminin α2 LG (A2G7) | |
| 454 | SYWYRIEASRTG | integrin | Laminin α2 LG (A2G10) | |
| 455 | ISTVMFKFRTFS | integrin | Laminin α2 LG (A2G25) | |
| 456 | KQANISIVDIDSN | integrin | Laminin α2 LG (A2G34) | |
| 457 | FSTRNESGIILL | integrin | Laminin α2 LG (A2G48) | |
| 458 | RRQTTQAYYAIF | integrin | Laminin α2 LG (A2G51) | |
| 459 | YAIFLNKGRLEV | integrin | Laminin α2 LG (A2G52) | |
| 460 | KNRLTIELEVRT | integrin | Laminin α2 LG (A2G76) | |
| 461 | GLLFYMARINHA | integrin | Laminin α2 LG (A2G78) | |
| 462 | VQLRNGFPYFSY | integrin | Laminin α2 LG (A2G80) | |
| 463 | HKIKIVRVKQEG | integrin | Laminin α2 LG (A2G84) | |
| 464 | DFGTVQLRNGFPFFSYD | integrin | Laminin EF-2 | |
| | LG | | | |
| 465 | YFDGTGFAKAVG | integrin | Laminin α2 LG (A2G94) | |
| 466 | NGQWHKVTAKKI | integrin | Laminin α2 LG (A2G103) | |
| 467 | AKKIKNRLELVV | integrin | Laminin α2 LG (A2G104) | |
| 468 | GFPGGLNQFGLTTN | integrin | Laminin α2 LG (A2G109) | |
| 469 | IRSLKLTKGTGKP | integrin | Laminin α2 LG (A2G111) | |
| 470 | AKALELRGVQPVS | integrin | Laminin α2 LG (A2G113) | |
| 471 | GOLFHVAYILIKF | integrin | Laminin α3 (A3-10) | |
| 472 | SQRIYQFAKLNYT | integrin | Laminin α3 LG (MA3G13) | |
| 473 | NVLSLYNFKTTF | integrin | Laminin α3 LG (MA3G22) | |
| 474 | NAPFPKLSWTIQ | integrin | Laminin α3 LG (MA3G27) | |
| 475 | WTIQTTVDRGLL | integrin | Laminin α3 LG (MA3G28) | |
| 476 | DTINNGRDHMILI | integrin | Laminin α3 LG (MA3G34) | |
| 477 | MILISIGKSQKRM | integrin | Laminin α3 LG (MA3G35) | |
| 478 | PPFLMLLKGSTR | integrin | Laminin α3 LG (A3GXX) | |
| 479 | NQRLASFSNAQQS | integrin | Laminin α3 LG (MA3G57) | |
| 480 | ISNVFVQRMSQSPEVLD | integrin | Laminin α3 LG (MA3G59) | |
| 481 | KARSFNVNOLLQD | integrin | Laminin α3 LG (MA3G63) | |
| 482 | KNSFMALYLSKG | integrin | Laminin α3 LG A3G75 | |
| 483 | KNSFMALYLSKGRLVFA | integrin | Laminin α3 LG A3G756 | |
| | LG | | | |
| 484 | RDSFVALYLSEGHVIFAL | integrin | Laminin EF-3 | |
| | G | | | |
| 485 | KPRLQFSLDIQT | integrin | Laminin α3 LG MA3G70 | |
| 486 | DGQWHSVTVSIK | integrin | Laminin α3 LG MA3G97 | |
| 487 | FVLYLGSKNAKK | integrin | Laminin α4 LG (A4G4) | |
| 488 | LAIKNDNLVYVY | integrin | Laminin α4 LG (A4G6) | |
| 489 | AYFSIVKIERVG | integrin | Laminin α4 LG (A4G10) | |
| 490 | DVISLYNFKHIY | integrin | Laminin α4 LG (A4G20) | |
| 491 | FFDGSSYAVVRD | integrin | Laminin α4 LG (A4G24) | |
| 492 | LHVFYDFGFSNG | integrin | Laminin α4 LG (A4G31) | |
| 493 | LKKAQINDAKYREISIIY | integrin | | |
| | HN | | | |
| 494 | RAYFNGQSFIAS | integrin | Laminin α4 LG (A4G47) | |
| 495 | SRLRGKNPTKGK | integrin | Laminin α4 LG (A4G59) | |
| 496 | LHKKGKNSSKPK | integrin | Laminin α4 LG (A4G69) | |
| 497 | RLKTRSSHGMIF | integrin | | |
| 498 | GEKSQFSIRLKT | integrin | Laminin α4 LG (A4G78) | |
| 499 | TLFLAHGRLVFM | integrin | Laminin α4 LG (A4G82) | |
| 500 | LVFMFNVGHKKL | integrin | Laminin α4 LG (A4G83) | |
| 501 | TLFLAHGRLVFMFNVGH | integrin | Laminin α4 LG (A4G823) | |
| | KKL | | | |
| 502 | DFMTLFLAHGRLVFMFN | integrin | Laminin EF-4 | |
| | VG | | | |
| 503 | HKKLKIRSQEKY | integrin | Laminin α4 LG (A4G84) | |
| 504 | GAAWKIKGPIYL | integrin | Laminin α4 LG (A4G90) | |
| 505 | VIRDSNVVQLDV | integrin | Laminin α4 LG (A4G107) | |
| 506 | EVNVTLDLGQVFH | α5β1 | Laminin Laminin α5 LN (S1) | |
| 507 | GQVFHVAYVLIKF | α4β1, α4β7 | Laminin Laminin α5 LN (S2) | |
| 508 | RDFTKATNIRLRFLR | α5β1 | Laminin Laminin α5 LN (S6) | |
| 509 | NIRLRFLRTNTL | α5β1 | Laminin Laminin α5 LN (S7) | |
| 510 | GKNTGDHFVLYM | α5β1 | Laminin α5 LG1 (A5G3) | |
| 511 | VVSLYNFEQTFML | integrin | Laminin α5 LG1 (A5G19) | |
| 512 | RFDQELRLVSYN | integrin | Laminin α5 LG2 (A5G26) | |
| 513 | ASKAIQVFLLGG | integrin | Laminin α5 LG2 (A5G33) | |
| 514 | TVFSVDQDNMLE | integrin | Laminin α5 LG2 (A5G36) | |
| 515 | RLRGPQRVFDLH | α5β1 | Laminin α5 LG3 (A5G63) | |
| 516 | SRATAQKVSRRS | integrin | Laminin α5 LG3 (A5G66) | |
| 517 | GSLSSHLEFVGI | integrin | Laminin α5 LG4 (A5G71) | |
| 518 | RNRLHLSMLVRP | integrin | Laminin α5 LG4 (A5G73) | |
| 519 | APMSGRSPSLVLK | integrin | Laminin α5 LG4 (A5G76) | |
| 520 | LALFLSNGHEVA | integrin | Laminin α5 LG4 (A5G77) | |
| 521 | PGRWHKVSVRWE | integrin | Laminin α5 LG4 (A5G81) | |
| 522 | VRWGMQQIQLVV | integrin | Laminin α5 LG4 (A5G82) | |
| 523 | KMPYVSLELEMR | integrin | Laminin α5 LG5 (A5G94) | |
| 524 | VLLQANDGAGEF | integrin | Laminin α5 LG5 (A5G99) | |
| 525 | DGRWHRVAVIMG | integrin | Laminin α5 LG5 (A5G101) | |
| 526 | APVNVTASVQIQ | integrin | Laminin α5 LG5 (A5G109) | |
| 527 | KQGKALTQRHAK | integrin | Laminin α5 LG5 (A5G112) | |
| 528 | AFGVLALWGTRV | integrin | Laminin Laminin VI (B-7) | |
| 529 | IENVVTTFAPNR | integrin | Laminin Laminin VI (B-15) | |
| 530 | LEAEFHFTHLIM | integrin | Laminin Laminin VI (B-19) | |
| 531 | HLIMTFKTFRPA | integrin | Laminin Laminin VI (B-20) | |
| 532 | KTWGVYRYFAYD | integrin | Laminin Laminin VI (B-23) | |
| 533 | TNLRIKFVKLHT | integrin | Laminin Laminin VI (B-31) | |
| 534 | REKYYYAVYDMV | integrin | Laminin Laminin VI (B-34) | |
| 535 | KRLVTGQR | integrin | Laminin Laminin V (B-54) | |
| 536 | KDISEKVAVYST | integrin | I (B-187) | |
| 537 | PDSGR | integrin | Laminin III (B-96) | |
| 538 | YIGSR | α1β1, α3β1 | Laminin III (B-98) | |
| 539 | DPGYIGSR | α1β1, α3β1 | Laminin III (B-98) | |
| 540 | FALWDAIIGEL | integrin | Laminin III (B-116) | |
| 541 | AAEPLKNIGILF | integrin | Laminin II (B-123) | |
| 542 | DSITKYFQMSLE | integrin | Laminin II (B-133) | |
| 543 | VILQQSAADIAR | integrin | Laminin I (B-160) | |
| 544 | SPYTFIDSLVLMPY | integrin | Laminin Laminin IV (B-77) | |
| 545 | KDISEKVAVYST | integrin | Laminin I (B-187) | |
| 546 | LGTIPG | integrin | | |
| 547 | LWPLLAVLAAVA | integrin | Laminin VI (C-3) | |
| 548 | KAFDITYVRLKF | αvβ3, α5β1 | Laminin VI (C-16) | |
| 549 | AFSTLEGRPSAY | integrin | Laminin VI (C-25) | |
| 550 | TDIRVTLNRLNTF | integrin | Laminin VI (C-28) | |
| 551 | NEPKVLKSYYYAI | integrin | Laminin VI (C-30) | |
| 552 | YYAISDFAVGGR | integrin | Laminin VI (C-31) | |
| 553 | LPFFNDRPWRRAT | integrin | Laminin VI (C-35) | |
| 554 | FDPELYRSTGHGGH | integrin | Laminin V (C-38) | |
| 555 | TNAVGYSVYDIS | integrin | Laminin V (C-50) | |
| 556 | APVKFLGNQVLSY | integrin | Laminin IV (C-57) | |
| 557 | SFSFRVDRRDTR | integrin | Laminin IV (C-59) | |
| 558 | SETTVKYIFRLHE | integrin | Laminin IV (C-64) | |
| 559 | FQKLLNNLTSIK | integrin | Laminin IV (C-67) | |
| 560 | TSIKIRGTYSER | integrin | Laminin IV (C-68) | |
| 561 | DPETGV | integrin | Laminin III (C75) | |
| 562 | TSAEAYNLLLRT | integrin | Laminin II (C-118) | |
| 563 | KEAEREVTDLLR | integrin | Laminin II (C102) | |
| 564 | SLLSQLNNLLDQ | integrin | Laminin II (C-155) | |
| 565 | RNIAEIIKDI | integrin | Laminin | |
| 566 | RDIAEIIKDI | integrin | Laminin | |
| 567 | GAPGER | integrin | Derived from Collagen alpha1 (I) | |
| 568 | FNKHTEIIEEDTNKDKPS | Fibronectin | (FAB D3: 1-37)-highest | Differential binding |
| | YQFGGHNSVDFEEDTLP | | affinity | affinity to Collagen |
| | KV | | | |
| 569 | PSYQFGGHNSVDFEEDT | Fibronectin | (FAB D3: 16-36)-high | Differential binding |
| | LPK | | affinity | affinity to Collagen |
| 570 | SYQFGGHNSVDFEEDT | Fibronectin | (FAB D3: 17-33)-medium | Differential binding |
| | | | affinity | affinity to Collagen |
| 571 | QFGGHNSVDFEEDTLPK | Fibronectin | (FAB D3: 20-36)-medium | Differential binding |
| | | | affinity | affinity to Collagen |
| 572 | FGGHNSVDFEEDTLPK | Fibronectin | (FAB D3: 21-36)-low | Differential binding |
| | | | affinity | affinity to Collagen |
| 573 | NAPQPSHISKYILRWRPK | Fibronectin | Fibronectin Type III(1) | |
| | NSVGRWKEATIPGHLNS | | | |
| | YTIKGLKPGVVYEGQLIS | | | |
| | IQQYGHQEVTRFDFTTTS | | | |
| | TSTPVTSNTVTGETTPFS | | | |
| | PLVATSESVTEITASSFV | | | |
| | VS | | | |
| 574 | NAPQPSHISKYILRWRPK | Fibronectin | Fibronectin Type III(1) fragment | |
| | NSVGRWKEATIPG | | | |
| 575 | EATIPGHLNSYTIKGLKP | Fibronectin | Fibronectin Type III(1) fragment | |
| | GVVYEGQLISIQQ | | | |
| 576 | LISIQQYGHQEVTRFDFT | Fibronectin | Fibronectin Type III(1) fragment | |
| | TTSTSTPVTSNTV | | | |
| 577 | VTSNTVTGETTPFSPLVA | Fibronectin | Fibronectin Type III(1) fragment | |
| | TSESVTEITASSFVVS | | | |
| 578 | RWSHDNGVNYKIGEKW | Fibronectin | Fibronectin Type III(1) fragment (synthetic) | |
| | DRQGENGQMMSSTSLG | | | |
| | NGKGEFKSDPHE | | | |
| 579 | ATSYDDGKTYHVGEQW | Fibronectin | Fibronectin Type III(1) fragment (synthetic) | |
| | QKEYLGAISSSTSFGGQR | | | |
| | GWRSDNSR | | | |
| 580 | DKPSYQFGGHNSVDFEE | Fibronectin | | |
| | DT | | | |
| 581 | DKPSYQFGGHNSVDFEE | Fibronectin | | |
| | DTL | | | |
| 582 | DKPSYQFGGHNSVDFEE | Fibronectin | | |
| | DTLP | | | |
| 583 | DKPSYQFGGHNSVDFEE | Fibronectin | | |
| | DTLPK | | | |
| 584 | KPSYQFGGHNSVDFEED | Fibronectin | | |
| | T | | | |
| 585 | KPSYQFGGHNSVDFEED | Fibronectin | | |
| | TL | | | |
| 586 | KPSYQFGGHNSVDFEED | Fibronectin | | |
| | TLP | | | |
| 587 | KPSYQFGGHNSVDFEED | Fibronectin | | |
| | TLPK | | | |
| 588 | PSYQFGGHNSVDFEEDT | Fibronectin | | |
| 589 | PSYQFGGHNSVDFEEDT | Fibronectin | | |
| | L | | | |
| 590 | PSYQFGGHNSVDFEEDT | Fibronectin | | |
| | LP | | | |
| 591 | PSYQFGGHNSVDFEEDT | Fibronectin | | |
| | LPK | | | |
| 592 | PPFLMLLKGSTRFNKTK | Heparin/syndecans | Derived from Heparin | Differential binding |
| | TFR | | Binding Domans of Laminin | affinity to |
| | | | | Heparin/syndecans |
| 593 | RLVFALGTDGKKLRIKS | Heparin/syndecans | Derived from Heparin | Differential binding |
| | KEKCNDGK | | Binding Domans of Laminin | affinity to |
| | | | | Heparin/syndecans |
| 594 | PLFLLHKKGKNLSKPKA | Heparin/syndecans | Derived from Heparin | Differential binding |
| | SQNKKGGKSK | | Binding Domans of Laminin | affinity to |
| | | | | Heparin/syndecans |
| 595 | TLFLAHGRLVYMFNVG | Heparin/syndecans | Derived from Heparin | Differential binding |
| | HKKLKIR | | Binding Domans of Laminin | affinity to |
| | | | | Heparin/syndecans |
| 596 | TPGLGPRGLQATARKAS | Heparin/syndecans | Derived from Heparin | Differential binding |
| | RRSRQPARHPACML | | Binding Domans of Laminin | affinity to |
| | | | | Heparin/syndecans |
| 597 | RQRSRPGRWHKVSVRW | Heparin/syndecans | Derived from Heparin | Differential binding |
| | EKNR | | Binding Domans of Laminin | affinity to |
| | | | | Heparin/syndecans |
| 598 | LAGSCLARFSTM | α2β1, Heparin | Derived from Collagen alpha1(IV) HepII | |
| 599 | KGHRGF | Heparin | Derived from Collagen alpha1(I) | |
| 600 | GDRGIKGHRGFSG | Heparin | Derived from Collagen alpha1(I) | |
| 601 | GDLGRPGRKGRPGPP | Heparin | Derived from Collagen alpha1(I) | |
| 602 | GHRGPTGRPGKRGKQG | Heparin | Derived from Collagen alpha1(I) | |
| | QKGDS | | | |
| 603 | KGIRGH | Heparin | Derived from Collagen alpha2(I) | |
| 604 | GEFYFDLRLKGDK | α2β1, Heparin | Derived from Collagen alpha1(IV) HepIII | |
| 605 | KYILRWRPKNS | Heparin | Derived from Fibronectin III-1 | |
| 606 | YRVRVTPKEKTGPMKE | Heparin | Derived from Fibronectin III-13 (FN-C/H-III) | |
| 607 | SPPRRARVT | α5β1, Heparin | Derived from Fibronectin III-13 (FN-C/H-IV) | |
| 608 | ATETTITIS | Heparin | Derived from Fibronectin III-13 | |
| 609 | VSPPRRARVTDATETTIT | α5β1, Heparin | Derived from Fibronectin III-13 | |
| | ISWRTKTETITGFG | | | |
| 610 | KPDVRSYTITG | α4β1, Heparin | Derived from Fibronectin III-13 | |
| 611 | ANGQTPIQRYIK | α4β1, Heparin | Derived from Fibronectin III-13 | |
| 612 | YEKPGSPPREVVPRPRPG | Heparin | Derived from Fibronectin III-14 (FN-C/H-I) | |
| | V | | | |
| 613 | KNNQKSEPLIGRKKT | Heparin | Derived from Fibronectin III-14 (FN-C/H-II) | |
| 614 | EILDVPST | integrin | Derived from Fibronectin IIICS-1 | |
| 615 | TAGSCLRKFSTM | α2β1, Heparin | Derived from Collagen alphal (IV) HepI | |
| 616 | FRHRNRKGY | Heparin | HPV | |
| 617 | KKQRFRHRNRKGYRSQ | Heparin | HPV | |
| 618 | KRSR | Heparin | Bone sialoprotein | |
| 619 | FHRRIKA | Heparin, HSP | Bone sialoprotein | |
| 620 | SINNTAVMQRLT | Heparin | Laminin Laminin α1 L4a (A51) | |
| 621 | ANVTHLLIRANY | Heparin | Laminin α1 L4a (A65) | |
| 622 | AGTFALRGDNPQG | integrin | Laminin α1 L4a (A99) | |
| 623 | RLVSYSGVLFFLK | Heparin | Laminin α5 LG2 (A5G27) | |
| 624 | GIIFFL | Heparin | Laminin α5 LG2 (A5G) | |
| 625 | VLVRVERATVES | Heparin | Laminin α5 LG2 (A5G35) | |
| 626 | RIQNLLKITNLRIKFVK | Heparin | Laminin Laminin VI (B-30) | |
| 627 | GPGVVVVERQYI | Heparin | Laminin IV (B-62) | |
| 628 | RYVVLPR | Heparin | Laminin IV (B-73) | |
| 629 | LSNIDYILIKAS | SDC-4 | Laminin α1 L4a (A119) | |
| 630 | LQQSRIANISME | SDC-4 | Laminin α1 L4a (A121) | |
| 631 | LQVQLSIR | SDC-1, -4 | Laminin αl LG4 (AG73) | |
| 632 | RKRLQVQLSIRT | SDC-1, -4 | Laminin α1 LG4 (AG73) | |
| 633 | GLIYYVAHQNQM | SDC-1, -4 | Laminin α1 LG4 (AG75) | |
| 634 | FDLHQNMGSVN | SDC-4 | Laminin α5 LG3 (A5G64) | |
| 635 | QQNLGSVNVSTG | SDC-4 | Laminin α5 LG3 (A5G65) | |
| 636 | WQPPRARI | SDC-4 | Derived from Fibronectin III-14 (FN-C/H-V) | |
| 637 | WQPPRARITGYIIKYEKP | SDC-4 | Derived from Fibronectin III-14 (FN-C/H-V) | |
| | G | | | |
| 638 | KNSFMALYLSKGR | syndecan 2(w) | Derived from Heparin | Differential binding |
| | | | Binding Domans of Laminin | affinity to |
| | | | | Heparin/syndecans |

| | | | |
|---|---|---|---|
| 639 | NGRKIRMRCRAIDGD | Heparan sulfate | binds to HSGP with high affinity (DTx protein) |
| | | proteoglycans | |
| 640 | DVIRDKTKTKIESLK | Heparan sulfate | binds to HSGP with low affinity (DTx protein) |
| | | proteoglycans | |

pH-sensitive targeting sequences

| 641 | GVYHREARSGKYKLTY | hyaluronic acid | pH dependent (Link_TGS6) | binds better at lower |
|---|---|---|---|---|
| | AEAKAVCEFEGGHLATY | | | pH |
| | KGLEAARKIGFHVCAAG | | | |
| | WMAKGRVGYPIVKPGPP | | | |
| | NCGFGKTGIIDYGIRLNR | | | |
| | SERWDAYCYNPHA | | | |
| 642 | KHAHLKKQVSDHIAVY | Heparin | binds to heparin at low pH (high affinity) | |
| 643 | TTEPSEEHNHHK | Heparin | binds to heparin at low pH (low affinity) | |
| 644 | KHAHL | Heparin | binds to heparin at low pH (lower affinity) | |
| 645 | TTEPSEEHNHHK | Heparin | binds to heparin at low pH (lower affinity) | |
| 646 | TTEPSEEHNHHKHHDK | Heparin | binds to heparin at low pH (lower affinity) | |
| 647 | HKGQHR | Heparin | binds to heparin at low pH (lower affinity) | |
| 648 | KVEHRVKKRPPTWRHN | Heparin | binds to heparin at low pH | |
| | VRAKYT | | | |
| 649 | GGKVEHRVKKRPPTWR | Heparin | binds to heparin at low pH | |
| | HNVRAKYT | | | |
| 650 | KKRPPTWRHNV | Heparin | binds to heparin at low pH | |
| 651 | GTWSEW | heparin | derived from thrombospondin | |
| 652 | GFWSEW | heparin | derived from thrombospondin | |
| 653 | GGWSHW | Fibronectin | derived from | binds better at |
| | | | thrombospondin | lower pH |
| | | | (highest affinity) | |
| 654 | KRFKQDGGWSHWSPWS | Fibronectin | derived from thrombospondin (low affinity) | |
| | S | | | |
| 655 | KRFKQDGGWSHWSP | Fibronectin | derived from thrombospondin (medium affinity) | |
| 656 | GGWSHWSPWSS | Fibronectin | derived from thrombospondin (medium affinity) | |
| 657 | WSXWS | Sulfated Glycoprotein | derived from thrombospondin (X = any amino acids) | |
| 658 | WSHW | Sulfated Glycoprotein | derived from thrombospondin | |
| 659 | Xaa Xaa Pro His Glu | heparin/heparan sulfate | Xaa = any amino acid | |
| 660 | (H/P)(H/P)PHG | heparin/heparan sulfate | tandem repeat-pH dependent HRGP (Histidine Rich | |
| | | | Glyco Protein) | |
| 661 | HPHKHHSHEQHPHGHHP | heparin/heparan sulfate | Histidine Rich Glycoprotein (Histidine Rich | |
| | HAHHPHEHDTHRQHPH | | Domain) | |
| | GHHPHGHHPHGHHPHG | | | |
| | HHPHGHHPHCHDFQDY | | | |
| | GPCDPPPHNQGHCCHGH | | | |
| | GPPPGHLRRRGPGKGPR | | | |
| | PFHCRQIGSVYRLPPLRK | | | |
| | GEVLPLPEANFPSFPLPH | | | |
| | HKHPLKPDNQPFP | | | |
| 662 | DLHPHKHHSHEQHPHGH | heparin/heparan sulfate | Histidine Rich Glycoprotein (Histidine Rich | |
| | HPHAHHPHEHDTHRQHP | | Domain) | |
| | H | | | |
| 663-679 | Not Used | | | |

Control sequence

| 680 | QFGGHNSVDFEEDT | Fibronectin | non-binding control |
|---|---|---|---|
| 681-700 | Not Used | | |

### Definitions

[0191] As used herein, a “cytokine polypeptide sequence” refers to a polypeptide sequence (which may be part of a larger sequence, e.g., a fusion polypeptide) with significant sequence identity to a wild-type cytokine and which can bind and activate a cytokine receptor when separated from an inhibitory polypeptide sequence. In some embodiments, a cytokine polypeptide sequence has at least 80, 85, 90, 95, 97, 98, or 99 percent identity to the sequence of a wild-type cytokine, e.g., a wild-type human cytokine. In some embodiments, a cytokine polypeptide sequence has no more than one, two, three, four, five, six, seven, eight, nine, or ten amino acid differences from a wild-type cytokine, e.g., a wild-type human cytokine. Cytokines include but are not limited to chemokines. Exemplary cytokine polypeptide sequences are provided in Table 1. This definition applies to IL-2 polypeptide sequences with substitution of “IL-2” for “cytokine.”

[0192] As used herein, an “inhibitory polypeptide sequence” is a sequence in a cytokine prodrug that inhibits the activity of the cytokine polypeptide sequence in the prodrug. The inhibitory polypeptide sequence binds the cytokine polypeptide sequence, and such binding is reduced or eliminated by action of an appropriate protease on the protease-cleavable polypeptide sequence. Exemplary inhibitory polypeptide sequences are provided in Table 1.

[0193] As used herein, a “protease-cleavable polypeptide sequence” is a sequence that is a substrate for cleavage by a protease. The protease-cleavable polypeptide sequence is located in a cytokine prodrug such that its cleavage reduces or eliminates binding of the inhibitory polypeptide sequence to the cytokine polypeptide sequence.

[0194] As used herein, a protease-cleavable polypeptide sequence “is recognized by” a given protease or class thereof if exposing a polypeptide comprising the protease-cleavable polypeptide sequence to the protease under conditions permissive for cleavage by the protease results in a significantly greater amount of cleavage than is seen for a control polypeptide having an unrelated sequence, and/or if the protease-cleavable polypeptide sequence corresponds to a known recognition sequence for the protease (e.g., as described elsewhere herein for various exemplary proteases).

[0195] As used herein, a “pharmacokinetic modulator” is a moiety that extends the in vivo half-life of a cytokine prodrug. The pharmacokinetic modulator may be a fused domain in a cytokine prodrug or may be a chemical entity attached post-translationally. The attachment may be, but is not necessarily, covalent. Exemplary pharmacokinetic modulator polypeptide sequences are provided in Table 1. Exemplary non-polypeptide pharmacokinetic modulators are described elsewhere herein.

[0196] As used herein, a “targeting sequence” is a sequence that results in a greater fraction of a cytokine prodrug localizing to an area of interest, e.g., a tumor microenvironment. The targeting sequence may bind an extracellular matrix component or other entity found in the area of interest, e.g., an integrin or syndecan. Exemplary targeting sequences are provided in Table 2.

[0197] As used herein, an “extracellular matrix component” refers to an extracellular protein or polysaccharide found in vivo. Integral and peripheral membrane proteins on a cell, including fibronectins, cadherins, integrins, and syndecans, are not considered extracellular matrix components.

[0198] As used herein, an “immunoglobulin constant domain” refers to a domain that occurs in or has significant sequence identity to a domain of a constant region of an immunoglobulin, such as an IgG. Exemplary constant domains are C_{H}2 and C_{H}3 domains. Unless indicated otherwise, a polypeptide or prodrug comprising an immunoglobulin constant domain may comprise more than one immunoglobulin constant domain. In some embodiments, an immunoglobulin constant domain has at least 80, 85, 90, 95, 97, 98, or 99 percent identity to the sequence of a wild-type immunoglobulin constant domain, e.g., a wild-type human immunoglobulin constant domain. In some embodiments, an immunoglobulin constant domain has no more than one, two, three, four, five, six, seven, eight, nine, or ten amino acid differences from a wild-type immunoglobulin constant domain, e.g., a wild-type human immunoglobulin constant domain. In some embodiments, immunoglobulin constant domain has an identical sequence to a wild-type immunoglobulin constant domain, e.g., a wild-type human immunoglobulin constant domain. Exemplary immunoglobulin constant domains are contained within sequences provided in Table 1. This definition applies to C_{H}2 and C_{H}3 domains, respectively, with substitution of “C_{H}2” or “C_{H}3” for “immunoglobulin constant,” with the qualification that a C_{H}2 domain sequence does not have greater percent identity to a non-C_{H}2 immunoglobulin constant domain wild-type sequence than to a C_{H}2 domain wild-type sequence, and a C_{H}3 domain sequence does not have greater percent identity to a non-C_{H}3 immunoglobulin constant domain wild-type sequence than to a C_{H}3 domain wild-type sequence. These definitions also include domains having minor truncations relative to wild-type sequences, to the extent that the truncation does not abrogate substantially normal folding of the domain.

[0199] As used herein, a “immunoglobulin Fc region” refers to a region of an immunoglobulin heavy chain comprising a C_{H}2 and a C_{H}3 domain, as defined above. The Fc region does not include a variable domain or a C_{H}1 domain.

[0200] As used herein, a given component is “between” a first component and a second component if the first component is on one side of the given component and the second component is on the other component, e.g., in the primary sequence of a polypeptide. This term does not require immediate adjacency. Thus, in the structure 1-2-3-4, 2 is between 1 and 4, and is also between 1 and 3.

[0201] As used herein, a “domain” may refer, depending on the context, to a structural domain of a polypeptide or to a functional assembly of at least one domain (but possibly a plurality of structural domains). For example, a C_{H}2 domain refers to a part of a sequence that qualifies as such. An immunoglobulin cytokine-binding domain may comprise VH and VL structural domains.

[0202] As used herein, “denatured collagen” encompasses gelatin and cleavage products resulting from action of an MMP on collagen, and more generally refers to a form of collagen or fragments thereof that does not exist in the native structure of full-length collagen.

[0203] As used herein, “configured to bind . . . in a pH-sensitive manner” means that a polypeptide sequence (e.g., a targeting sequence) shows differential binding affinity for its binding partner depending on pH. For example, the polypeptide sequence may have a higher affinity at a relatively acidic pH than at normal physiological pH (about 7.4). The higher affinity may occur at a pH below 7, e.g., in the range of pH 5.5-7, 6-7, or 5.5-6.5, or below pH 6.

[0204] As used herein, a “cytokine-binding domain of a cytokine receptor” refers to an extracellular portion of a cytokine receptor, or a fragment or truncation thereof that can bind a cytokine polypeptide sequence. In some embodiments, the sequence of a cytokine binding domain of a cytokine receptor has at least 80, 85, 90, 95, 97, 98, or 99 percent identity to the sequence of a cytokine binding domain of wild-type cytokine receptor, e.g., a cytokine binding domain of a wild-type human cytokine receptor. Exemplary sequences of a cytokine binding domain of a cytokine receptor are provided in Table 1. This definition applies to IL-2-binding domains of an IL-2 receptor with substitution of “IL-2” for “cytokine.”

[0205] As used herein, a “cytokine-binding immunoglobulin domain” refers to one or more immunoglobulin variable domains (e.g., a VH and a VL domain) that can bind a cytokine polypeptide sequence. Exemplary sequences of a cytokine-binding immunoglobulin domain are provided in Table 1. This definition applies to IL-2-binding immunoglobulin domains with substitution of “IL-2” for “cytokine.”

[0206] As used herein, “substantially” and other grammatical forms thereof mean sufficient to work for the intended purpose. The term “substantially” thus allows for minor, insignificant variations from an absolute or perfect state, dimension, measurement, result, or the like such as would be expected by a person of ordinary skill in the field but that do not appreciably affect overall performance. When used with respect to numerical values or parameters or characteristics that can be expressed as numerical values, “substantially” means within ten percent.

[0207] As used herein, the term “plurality” can be 2, 3, 4, 5, 6, 7, 8, 9, 10, or more.

[0208] As used herein, a first sequence is considered to “comprise a sequence with at least X % identity to” a second sequence if an alignment of the first sequence to the second sequence shows that X % or more of the positions of the second sequence in its entirety are matched by the first sequence. For example, the sequence QLYV comprises a sequence with 100% identity to the sequence QLY because an alignment would give 100% identity in that there are matches to all three positions of the second sequence. Exemplary alignment algorithms are the Smith-Waterman and Needleman-Wunsch algorithms, which are well-known in the art. One skilled in the art will understand what choice of algorithm and parameter settings are appropriate for a given pair of sequences to be aligned; for sequences of generally similar length and expected identity >50% for amino acids or >75% for nucleotides, the Needleman-Wunsch algorithm with default settings of the Needleman-Wunsch algorithm interface provided by the EBI at the www.ebi.ac.uk web server is generally appropriate.

[0209] As used herein, a “subject” refers to any member of the animal kingdom. In some embodiments, “subject” refers to humans. In some embodiments, “subject” refers to non-human animals. In some embodiments, “subject” refers to primates. In some embodiments, subjects include, but are not limited to, mammals, birds, reptiles, amphibians, fish, insects, and/or worms. In certain embodiments, the non-human subject is a mammal (e.g., a rodent, a mouse, a rat, a rabbit, a monkey, a dog, a cat, a sheep, cattle, a primate, and/or a pig). In some embodiments, a subject may be a transgenic animal, genetically-engineered animal, and/or a clone. In certain embodiments of the present invention the subject is an adult, an adolescent or an infant. In some embodiments, the terms “individual” or “patient” are used and are intended to be interchangeable with “subject”.

### Cytokine Polypeptide Sequence

[0210] The cytokine polypeptide sequence may be a wild-type cytokine polypeptide sequence or a sequence with one or more differences from the wild-type cytokine polypeptide sequence. In some embodiments, the cytokine polypeptide sequence is a human cytokine polypeptide sequence (which may be wild-type or may have one or more differences). In some embodiments, the cytokine comprises a modification to prevent disulfide bond formation, and optionally otherwise comprises wild-type sequence. In some embodiments, the cytokine polypeptide sequence has at least 80, 85, 90, 95, 97, 98, or 99 percent identity to the sequence of a wild-type cytokine polypeptide sequence or to a cytokine polypeptide sequence in Table 1. In some embodiments, the cytokine is a dimeric cytokine, e.g., a heterodimeric cytokine. In some embodiments, the cytokine is a homodimeric cytokine. The monomers may be linked as a fusion protein, e.g., with a linker, or by a covalent bond (e.g., disulfide bond), or by a noncovalent interaction. In some embodiments, the cytokine polypeptide sequence is an interleukin polypeptide sequence. In some embodiments, the cytokine polypeptide sequence is capable of binding a receptor comprising CD132. In some embodiments, the cytokine polypeptide sequence is capable of binding a receptor comprising CD122. In some embodiments, the cytokine polypeptide sequence is capable of binding a receptor comprising CD25.

### IL-2

[0211] In some embodiments, the cytokine polypeptide sequence is an IL-2 polypeptide sequence. The IL-2 polypeptide sequence may be a wild-type IL-2 polypeptide sequence or a sequence with one or more differences from the wild-type IL-2 polypeptide sequence. In some embodiments, the IL-2 polypeptide sequence is a human IL-2 polypeptide sequence (which may be wild-type or may have one or more differences). In some embodiments, the IL-2 comprises a modification to prevent disulfide bond formation (e.g., the sequence of aldesleukin (marketed as Proleukin®), and optionally otherwise comprises wild-type sequence. In some embodiments, the IL-2 polypeptide sequence has at least 80, 85, 90, 95, 97, 98, or 99 percent identity to the sequence of a wild-type IL-2 polypeptide sequence or to a IL-2 polypeptide sequence in Table 1.

### Inhibitory Polypeptide Sequence

[0212] Various types of inhibitory polypeptide sequences may be used in a cytokine prodrug according to the disclosure. In some embodiments, the inhibitory polypeptide sequence comprises a cytokine-binding domain.

[0213] The cytokine-binding domain may be the cytokine-binding domain of a cytokine receptor. The cytokine-binding domain of a cytokine receptor may be provided as an extracellular portion of the cytokine receptor or a portion thereof sufficient to bind the cytokine polypeptide sequence of the cytokine prodrug. In some embodiments, the cytokine-binding domain of a cytokine receptor has at least 80, 85, 90, 95, 97, 98, or 99 percent identity to the sequence of a wild-type cytokine-binding domain of a cytokine receptor, e.g., a wild-type cytokine-binding domain of a human cytokine receptor.

[0214] The cytokine-binding domain may be a fibronectin cytokine-binding domain. In some embodiments, the fibronectin cytokine-binding domain has at least 80, 85, 90, 95, 97, 98, or 99 percent identity to the sequence of a wild-type fibronectin cytokine-binding domain of a cytokine receptor, e.g., a wild-type human fibronectin cytokine-binding domain.

[0215] The cytokine-binding domain may be an immunoglobulin cytokine-binding domain. The immunoglobulin cytokine-binding domain may be an Fv, scFv, Fab, VHH, or other immunoglobulin sequence having antigen-binding activity for the cytokine polypeptide sequence. A VHH antibody (or nanobody) is an antigen binding fragment of a heavy chain only antibody.

[0216] Additional examples of inhibitory polypeptide sequences that may be provided to inhibit the cytokine polypeptide sequence of the cytokine prodrug are anticalins, affilins, affibody molecules, affimers, affitins, alphabodies, avimers, DARPins, fynomers, kunitz domain peptides, monobodies, and binding domains based on other engineered scaffolds such as SpA, GroEL, lipocallin and CTLA4 scaffolds.

[0217] IL-2 Inhibitory Polypeptide Sequence

[0218] In cytokine prodrugs comprising an IL-2 polypeptide sequence, the inhibitory polypeptide sequence may be an IL-2 inhibitory polypeptide sequence of any of the types described above. In some embodiments, the IL-2 inhibitory polypeptide sequence is an immunoglobulin IL-2 inhibitory polypeptide sequence. In some embodiments, the IL-2 inhibitory polypeptide sequence comprises an anti-IL-2 antibody or a functional fragment thereof. In some embodiments, the immunoglobulin IL-2 inhibitory polypeptide sequence comprises a set of six anti-IL2 hypervariable regions (HVRs) set forth in Table 1 (e.g., SEQ ID NOs: 34-39 or 750-755). In some embodiments, the IL-2 inhibitory polypeptide sequence comprises a set of anti-IL2 VH and VL sequences having at least 80, 85, 90, 95, 97, 98, or 99 percent identity to the sequence of a set of anti-IL2 VH and VL sequences set forth in Table 1, either as individual sequences or as part of an scFv. In some embodiments, the IL-2 inhibitory polypeptide sequence comprises a set of anti-IL2 VH and VL sequences having the sequence of a set of anti-IL2 VH and VL sequences set forth in Table 1, either as individual sequences or as part of an scFv. Exemplary IL-2 inhibitory polypeptide sequences include SEQ ID NOS: 10-31, 40-51, and 747, and a combination of SEQ ID NOs 32 and 33 or a combination of SEQ ID NOs 748 and 749.

### Protease-Cleavable Sequence

[0219] The protease-cleavable sequence may be selected from sequences cleavable by various types of proteases, e.g., a metalloprotease, a serine protease, a cysteine protease, an aspartate protease, a threonine protease, a glutamate protease, a gelatinase, an asparagine peptide lyase, a cathepsin, a kallikrein, a plasmin, a collagenase, a hK1, a hK10, a hK15, a stromelysin, a Factor Xa, a chymotrypsin-like protease, a trypsin-like protease, a elastase-like protease, a subtilisin-like protease, an actinidain, a bromelain, a calpain, a caspase, a Mir 1-CP, a papain, a HIV-1 protease, a HSV protease, a CMV protease, a chymosin, a renin, a pepsin, a matriptase, a legumain, a plasmepsin, a nepenthesin, a metalloexopeptidase, a metalloendopeptidase, an ADAM 10, an ADAM17, an ADAM 12, an urokinase plasminogen activator (uPA), an enterokinase, a prostate-specific target (PSA, hK3), an interleukin-1b converting enzyme, a thrombin, a FAP (FAP-a), a dipeptidyl peptidase, or dipeptidyl peptidase IV (DPPIV/CD26), a type II transmembrane serine protease (TTSP), a neutrophil elastase, a proteinase 3, a mast cell chymase, a mast cell tryptase, or a dipeptidyl peptidase. In some embodiments, the protease-cleavable sequence comprises the sequence of any one of those in Table 1 (e.g., SEQ ID NOs: 80-90 or 700-741), or a variant having one or two mismatches relative to the sequence of any one of those in Table 1 (e.g., SEQ ID NOs: 80-90 or 700-741). Proteases generally do not require an exact copy of the recognition sequence, and as such, the exemplary sequences may be varied at a portion of their amino acid positions. In some embodiments, the protease-cleavable sequence comprises a sequence that matches an MMP consensus sequence, such as any one of SEQ ID NOs: 91-94. One skilled in the art will be familiar with additional sequences recognized by these types of proteases.

[0220] Matrix Metalloprotease-Cleavable Sequence

[0221] In some embodiments, the protease-cleavable sequence is a matrix metalloprotease (MMP)-cleavable sequence. Exemplary MMP-cleavable sequences are provided in Table 1. In some embodiments, the MMP-cleavable sequence is cleavable by a plurality of MMPs and/or one or more of MMP-1, MMP-2, MMP-3, MMP-7, MMP-8, MMP-9, MMP-12, MMP-13, and/or MMP-14. Table 1, e.g., SEQ ID NOs: 80-90, provides exemplary MMP-cleavable sequences.

### Targeting Sequence

[0222] In some embodiments, the targeting sequence facilitates localization, accumulation, and/or retention of the cytokine prodrug and/or the cytokine polypeptide sequence (e.g., after proteolysis of the protease-cleavable sequence) in an area of interest, e.g., a tumor microenvironment (TME). The targeting sequence may be a sequence that binds an extracellular matrix component. Exemplary extracellular matrix components are a collagen or denatured collagen (in either case, the collagen may be collagen I, II, III, or IV), poly(I), von Willebrand factor, IgB (CD79b), heparin, a sulfated glycoprotein, or hyaluronic acid.

[0223] In other embodiments, the targeting sequence binds a target other than an extracellular matrix component. In some embodiments, the targeting sequence binds IgB (CD79b), a fibronectin, an integrin, a cadherin, a heparan sulfate proteoglycan, or a syndecan. In some embodiments, the targeting sequence binds at least one integrin, such as one or more of all integrin, α2β1 integrin, α3β1 integrin, α4β1 integrin, α5β1 integrin, α6β1 integrin, α7β1 integrin, α9β1 integrin, α4β7 integrin, αvβ3 integrin, αvβ5 integrin, αIIbβ3 integrin, αIIIbβ3 integrin, αMβ2 integrin, or αIIbβ3 integrin. In some embodiments, the targeting sequence binds at least one syndecan, such as one of more of syndecan-1, syndecan-4, and syndecan-2(w). Cytokine prodrugs comprising such targeting sequences may also comprise an MMP-cleavable linker as set forth elsewhere herein, such as an MMP-cleavable linker comprising any one of SEQ ID NOs: 80-90, or a variant having one or two mismatches relative to the sequence of any one of SEQ ID NOs: 80-90.

[0224] In some embodiments, the targeting sequence comprises a sequence set forth in Table 2 (e.g., any one of SEQ ID NOs: 180-640), or a variant having one or two mismatches relative to such a sequence.

pH-Sensitive Targeting Sequences

[0225] In some embodiments, the targeting sequence is configured to bind its target in a pH-sensitive manner. In some embodiments, the targeting sequence has a higher affinity for its target at a relatively acidic pH than at normal physiological pH (about 7.4). The higher affinity may occur at a pH below 7, e.g., in the range of pH 5.5-7, 6-7, or 5.5-6.5, or below pH 6. The presence of histidines in the targeting sequence can confer pH-sensitive binding. Without wishing to be bound by any particular theory, histidines are considered more likely to be protonated at lower pH and can render binding a negatively-charged target more energetically favorable. Accordingly, in some embodiments, a targeting sequence comprises one or more histidines, e.g., 1, 2, 3, 4, 5, 6, 7, 8, 9, or 10 histidines. Including a pH-sensitive targeting sequence can enhance discrimination between tumor versus normal tissue by the cytokine prodrug, such that the cytokine prodrug is more preferentially retained in the tumor microenvironment compared to normal extracellular matrix. Thus, a pH-sensitive targeting element can further facilitate tumor specific delivery of the cytokine prodrug and thereby further reduce or eliminate toxicity that may result from cytokine activity in normal extracellular matrix.

[0226] Binding a target in a pH-sensitive manner can be useful where it is desired to localize or retain a cytokine prodrug or the cytokine polypeptide sequence thereof in an area with a pH different from normal physiological pH. For example, the tumor microenvironment may be more acidic than the blood and/or healthy tissue. As such, binding to a target in a pH-sensitive manner may improve the retention of the cytokine prodrug or the cytokine polypeptide sequence thereof in the area of interest, which can facilitate lower doses than would otherwise be needed and/or reduce systemic exposure and/or adverse effects.

[0227] In some embodiments, the targeting sequence is configured to bind any target described herein in a pH-sensitive manner. In particular embodiments, the target is an extracellular matrix component such as a hyaluronic acid, heparin, heparan sulfate, or a sulfated glycoprotein. In another particular embodiment, the target is a fibronectin.

[0228] Exemplary targeting sequences for conferring target binding in a pH-sensitive manner are provided in Table 2 (e.g., SEQ ID NOs: 641-662). In some embodiments, the targeting sequence comprises the sequence of any one of SEQ ID NOs: 641-662, or a variant having one or two mismatches relative to the sequence of any one of SEQ ID NOs: 641-662.

### Pharmacokinetic Modulators

[0229] In some embodiments, the cytokine prodrug comprises a pharmacokinetic modulator. The pharmacokinetic modulator may be covalently or noncovalently associated with the cytokine prodrug. The pharmacokinetic modulator can extend the half-life of the cytokine prodrug and optionally the cytokine polypeptide sequence, e.g., so that fewer doses are necessary and less of the prodrug needs to be administered over time to achieve a desired result. Various forms of pharmacokinetic modulator are known in the art and may be used in cytokine prodrugs of this disclosure. In some embodiments, the pharmacokinetic modulator comprises a polypeptide (see examples below). In some embodiments, the pharmacokinetic modulator comprises a non-polypeptide moiety (e.g., polyethylene glycol, a polysaccharide, or hyaluronic acid). A non-polypeptide moiety can be associated with the prodrug using known approaches, e.g., conjugation to the prodrug; for example, a reactive amino acid residue can be used or added to the prodrug to facilitate conjugation.

[0230] In some embodiments, the pharmacokinetic modulator alters the size, shape, and/or charge of the prodrug, e.g., in a manner that reduces clearance. For example, a pharmacokinetic modulator with a negative charge may inhibit renal clearance. In some embodiments, the pharmacokinetic modulator increases the hydrodynamic volume of the prodrug. In some embodiments, the pharmacokinetic modulator reduces renal clearance, e.g., by increasing the hydrodynamic volume of the prodrug.

[0231] In some embodiments, the cytokine prodrug comprising the pharmacokinetic modulator (e.g., any of the pharmacokinetic modulators described herein) has a molecular weight of at least 70 kDa, e.g., at least 75 or 80 kDa.

[0232] For further discussion of various approaches for providing a pharmacokinetic modulator, see, e.g., Strohl, BioDrugs 29:215-19 (2015) and Podust et al., J. Controlled Release 240:52-66 (2016).

[0233] Polypeptide Pharmacokinetic Modulators

[0234] In some embodiments, the pharmacokinetic modulator comprises a polypeptide, e.g., an immunoglobulin sequence (see exemplary embodiments below), an albumin, a CTP (a negatively-charged carboxy-terminal peptide of the chorionic gonadotropin 3-chain that undergoes sialylation in vivo and in appropriate host cells), an inert polypeptide (e.g., an unstructured polypeptide such as an XTEN, a polypeptide comprising the residues Ala, Glu, Gly, Pro, Ser, and Thr), a transferrin, a homo-amino-acid polypeptide, or an elastin-like polypeptide.

[0235] Exemplary polypeptide sequences suitable for use as a pharmacokinetic modulator are provided in Table 1 (e.g., any one of SEQ ID NOs: 70-74). In some embodiments, the pharmacokinetic modulator has at least 80, 85, 90, 95, 97, 98, or 99 percent identity to the sequence of a pharmacokinetic modulator in Table 1 (e.g., any one of SEQ ID NOs: 70-74).

[0236] In any embodiment where the pharmacokinetic modulator comprises a polypeptide sequence from an organism, the polypeptide sequence may be a human polypeptide sequence.

[0237] Immunoglobulin Pharmacokinetic Modulators

[0238] In some embodiments, the pharmacokinetic modulator comprises an immunoglobulin sequence, e.g., one or more immunoglobulin constant domains. In some embodiments, the pharmacokinetic modulator comprises an Fc region. The immunoglobulin sequence (e.g., one or more immunoglobulin constant domains or Fc region) may be a human immunoglobulin sequence. The immunoglobulin sequence (e.g., one or more immunoglobulin constant domains or Fc region) may have has at least 80, 85, 90, 95, 97, 98, or 99 percent identity to the sequence of a wild-type immunoglobulin sequence (e.g., one or more immunoglobulin constant domains or Fc region), such as a wild-type human immunoglobulin sequence. In any of such embodiments, the immunoglobulin sequence may be an IgG sequence (e.g., IgG1, IgG2, IgG3, or IgG4). Exemplary immunoglobulin pharmacokinetic modulator sequences include SEQ ID NOS: 70-74 and the combination of SEQ ID NOs 756 and 757.

### Arrangement of Components

[0239] The recitation of components of a cytokine prodrug herein does not imply any particular order beyond what is explicitly stated (for example, it may be explicitly stated that a protease-cleavable sequence is between the cytokine polypeptide sequence and the inhibitory polypeptide sequence). The components of the cytokine prodrug may be arranged in various ways to provide properties suitable for a particular use. The components of the cytokine prodrug may be all in one polypeptide chain or they may be in a plurality of polypeptide chains bridged by covalent bonds, such as disulfide bonds. For example, where a pharmacokinetic modulator comprises an Fc, one or more components may be bound to one chain while one or more other components may be bound to the other chain. The Fc may be a heterodimeric Fe, such as a knob-into-hole Fc (in which one chain of the Fc comprises knob mutations and the other chain of the Fc comprises hole mutations). For an exemplary general discussion of knob and hole mutations, see, e.g., Xu et al., mAbs 7:1, 231-242 (2015). Exemplary knob mutations (e.g., for a human IgG1 Fc) are K360E/K409W. Exemplary hole mutations (e.g., for a human IgG1 Fc) are Q347R/D399V/F405T. See SEQ ID NOs: 756 and 757.

[0240] For example, a pharmacokinetic modulator can be present on the same side of the protease-cleavable sequence as the cytokine polypeptide sequence, meaning that cleavage of the protease-cleavable sequence does not separate the pharmacokinetic modulator from the cytokine polypeptide sequence. Examples of such structures include CY-PM-CL-IN, IN-CL-CY-PM, and any other permutation (or variation in which additional elements are included between, before, or after the listed components) in which CL is not between CY and PM, where CY is the cytokine polypeptide sequence, PM is the pharmacokinetic modulator, CL is the protease-cleavable sequence, and IN is the inhibitory polypeptide sequence. In such embodiments, the pharmacokentic modulator will modulate the pharmacokinetics of both the prodrug and the active cytokine polypeptide sequence. In some embodiments, the pharmacokinetic modulator is an Fc, in which case the components preceding and following PM in the exemplary structures above may be bound to the same or different chains of the Fc, as discussed above.

[0241] In some embodiments, a pharmacokinetic modulator is present on the same side of the protease-cleavable sequence as the inhibitory polypeptide sequence, meaning that cleavage of the protease-cleavable sequence does separate the pharmacokinetic modulator from the cytokine polypeptide sequence. Such embodiments can be useful to provide a longer half-life for the prodrug than for the active form.

[0242] In some embodiments, a targeting sequence can be present on the same side of the protease-cleavable sequence as the cytokine polypeptide sequence, meaning that cleavage of the protease-cleavable sequence does not separate the targeting sequence from the cytokine polypeptide sequence. Such embodiments can be useful to facilitate localizing or retaining both the prodrug and the active form in an area of interest, e.g., a tumor microenvironment. Where a pharmacokinetic modulator is used, it can be on the same side of the protease-cleavable linker as the targeting sequence (e.g., to facilitate lower and/or less frequent dosing) or on the other side (e.g., to avoid long-duration immune stimulation), depending on the desired effects.

[0243] In some embodiments, a targeting sequence is present on the same side of the protease-cleavable sequence as the inhibitory polypeptide sequence, meaning that cleavage of the protease-cleavable sequence does separate the targeting sequence from the cytokine polypeptide sequence. Such embodiments can be useful to provide a gradient of cytokine emanating from an area of interest, or to provide such a gradient more rapidly than would occur if the targeting sequence were on the same side of the protease-cleavable sequence. Where a pharmacokinetic modulator is used, it can be on the same side of the protease-cleavable linker as the targeting sequence (e.g., to minimize systemic exposure to the active form of the cytokine and/or avoid long-duration immune stimulation) or on the other side (e.g., to facilitate lower and/or less frequent dosing), depending on the desired effects.

[0244] A number of exemplary arrangements are illustrated in FIGS. 9 and 10A-E. In some embodiments, the cytokine prodrug comprises components arranged according to any of the examples in FIGS. 9 and 10A-E, ordered from N- to C-terminus or from C- to N-terminus, optionally with additional components inserted between any of the illustrated components.

### Exemplary Prodrugs

[0245] IL-2

[0246] The following table shows exemplary combinations of components according to certain embodiments of the disclosed cytokine prodrugs. The numbers indicate SEQ ID NOs for a given component. CY is the cytokine polypeptide sequence, CL is the protease-cleavable sequence, and IN is the inhibitory polypeptide sequence, and, where present, PM is the pharmacokinetic modulator. Where a range is given, any one of the listed SEQ ID NOs may be selected. Where two SEQ ID NOs are recited conjunctively (using “and”), both SEQ ID NOs are present and can function together (they may or may not be fused to each other, optionally with an intervening linker, or bridged, e.g., by a covalent bond). For example, SEQ ID NOs 32 and 33 are VL and VH domains that can function together to form a cytokine-binding immunoglobulin domain, as are SEQ ID NOs 748 and 749. SEQ ID NOs 256 and 257 are Fc polypeptide chains for forming a heterodimeric knob-into-hole Fc that can serve as a pharmacokinetic modulator. The components may be arranged in any manner consistent with the disclosure, e.g., as indicated elsewhere herein. In some embodiments, a cytokine prodrug comprises a combination of sequences as set forth in Table 3A.

TABLE 3A
Exemplary IL-2 prodrugs

| CY | CL | IN | PM |
|---|---|---|---|
| 1-2 | 80-90 or | 10-16, 30, 31, 40-51, 747, | |
| | 201-242 | (32 and 33), or (748 and 749) | |
| 1-2 | 80-90 or | 10-16, 30, 31, 40-51, 747, | 70-74 or |
| | 201-242 | (32 and 33), or (748 and 749) | (756 and 757) |
| 1 | 80-90 or | 10 | |
| | 201-242 | | |
| 1 | 80-90 or | 11 | |
| | 201-242 | | |
| 1 | 80-90 or | 12 | |
| | 201-242 | | |
| 1 | 80-90 or | 13 | |
| | 201-242 | | |
| 1 | 80-90 or | 14 | |
| | 201-242 | | |
| 1 | 80-90 or | 15 | |
| | 201-242 | | |
| 1 | 80-90 or | 16 | |
| | 201-242 | | |
| 1 | 80-90 or | 20 | |
| | 201-242 | | |
| 1 | 80-90 or | 21 | |
| | 201-242 | | |
| 1 | 80-90 or | 22 | |
| | 201-242 | | |
| 1 | 80-90 or | 23 | |
| | 201-242 | | |
| 1 | 80-90 or | 24 | |
| | 201-242 | | |
| 1 | 80-90 or | 25 | |
| | 201-242 | | |
| 1 | 80-90 or | 26 | |
| | 201-242 | | |
| 1 | 80-90 or | 27 | |
| | 201-242 | | |
| 1 | 80-90 or | 28 | |
| | 201-242 | | |
| 1 | 80-90 or | 29 | |
| | 201-242 | | |
| 1 | 80-90 or | 30 | |
| | 201-242 | | |
| 1 | 80-90 or | 31 | |
| | 201-242 | | |
| 1 | 80-90 or | 32 and 33 | |
| | 201-242 | | |
| 1 | 80-90 or | 40 | |
| | 201-242 | | |
| 1 | 80-90 or | 41 | |
| | 201-242 | | |
| 1 | 80-90 or | 42 | |
| | 201-242 | | |
| 1 | 80-90 or | 43 | |
| | 201-242 | | |
| 1 | 80-90 or | 44 | |
| | 201-242 | | |
| 1 | 80-90 or | 45 | |
| | 201-242 | | |
| 1 | 80-90 or | 46 | |
| | 201-242 | | |
| 1 | 80-90 or | 47 | |
| | 201-242 | | |
| 1 | 80-90 or | 48 | |
| | 201-242 | | |
| 1 | 80-90 or | 49 | |
| | 201-242 | | |
| 1 | 80-90 or | 50 | |
| | 201-242 | | |
| 1 | 80-90 or | 51 | |
| | 201-242 | | |
| 1 | 80-90 or | 747 | |
| | 201-242 | | |
| 1 | 80-90 or | 748 and 749 | |
| | 201-242 | | |
| 1 | 80-90 or | 10 | 70 |
| | 201-242 | | |
| 1 | 80-90 or | 10 | 71 |
| | 201-242 | | |
| 1 | 80-90 or | 10 | 72 |
| | 201-242 | | |
| 1 | 80-90 or | 10 | 73 |
| | 201-242 | | |
| 1 | 80-90 or | 10 | 74 |
| | 201-242 | | |
| 1 | 80-90 or | 10 | 756 and 757 |
| | 201-242 | | |
| 1 | 80-90 or | 11 | 70 |
| | 201-242 | | |
| 1 | 80-90 or | 11 | 71 |
| | 201-242 | | |
| 1 | 80-90 or | 11 | 72 |
| | 201-242 | | |
| 1 | 80-90 or | 11 | 73 |
| | 201-242 | | |
| 1 | 80-90 or | 11 | 74 |
| | 201-242 | | |
| 1 | 80-90 or | 11 | 756 and 757 |
| | 201-242 | | |
| 1 | 80-90 or | 12 | 70 |
| | 201-242 | | |
| 1 | 80-90 or | 12 | 71 |
| | 201-242 | | |
| 1 | 80-90 or | 12 | 72 |
| | 201-242 | | |
| 1 | 80-90 or | 12 | 73 |
| | 201-242 | | |
| 1 | 80-90 or | 12 | 74 |
| | 201-242 | | |
| 1 | 80-90 or | 12 | 756 and 757 |
| | 201-242 | | |
| 1 | 80-90 or | 13 | 70 |
| | 201-242 | | |
| 1 | 80-90 or | 13 | 71 |
| | 201-242 | | |
| 1 | 80-90 or | 13 | 72 |
| | 201-242 | | |
| 1 | 80-90 or | 13 | 73 |
| | 201-242 | | |
| 1 | 80-90 or | 13 | 74 |
| | 201-242 | | |
| 1 | 80-90 or | 13 | 756 and 757 |
| | 201-242 | | |
| 1 | 80-90 or | 14 | 70 |
| | 201-242 | | |
| 1 | 80-90 or | 14 | 71 |
| | 201-242 | | |
| 1 | 80-90 or | 14 | 72 |
| | 201-242 | | |
| 1 | 80-90 or | 14 | 73 |
| | 201-242 | | |
| 1 | 80-90 or | 14 | 74 |
| | 201-242 | | |
| 1 | 80-90 or | 14 | 756 and 757 |
| | 201-242 | | |
| 1 | 80-90 or | 15 | 70 |
| | 201-242 | | |
| 1 | 80-90 or | 15 | 71 |
| | 201-242 | | |
| 1 | 80-90 or | 15 | 72 |
| | 201-242 | | |
| 1 | 80-90 or | 15 | 73 |
| | 201-242 | | |
| 1 | 80-90 or | 15 | 74 |
| | 201-242 | | |
| 1 | 80-90 or | 15 | 756 and 757 |
| | 201-242 | | |
| 1 | 80-90 or | 16 | 70 |
| | 201-242 | | |
| 1 | 80-90 or | 16 | 71 |
| | 201-242 | | |
| 1 | 80-90 or | 16 | 72 |
| | 201-242 | | |
| 1 | 80-90 or | 16 | 73 |
| | 201-242 | | |
| 1 | 80-90 or | 16 | 74 |
| | 201-242 | | |
| 1 | 80-90 or | 16 | 756 and 757 |
| | 201-242 | | |
| 1 | 80-90 or | 20 | 70 |
| | 201-242 | | |
| 1 | 80-90 or | 20 | 71 |
| | 201-242 | | |
| 1 | 80-90 or | 20 | 72 |
| | 201-242 | | |
| 1 | 80-90 or | 20 | 73 |
| | 201-242 | | |
| 1 | 80-90 or | 20 | 74 |
| | 201-242 | | |
| 1 | 80-90 or | 20 | 756 and 757 |
| | 201-242 | | |
| 1 | 80-90 or | 21 | 70 |
| | 201-242 | | |
| 1 | 80-90 or | 21 | 71 |
| | 201-242 | | |
| 1 | 80-90 or | 21 | 72 |
| | 201-242 | | |
| 1 | 80-90 or | 21 | 73 |
| | 201-242 | | |
| 1 | 80-90 or | 21 | 74 |
| | 201-242 | | |
| 1 | 80-90 or | 21 | 756 and 757 |
| | 201-242 | | |
| 1 | 80-90 or | 22 | 70 |
| | 201-242 | | |
| 1 | 80-90 or | 22 | 71 |
| | 201-242 | | |
| 1 | 80-90 or | 22 | 72 |
| | 201-242 | | |
| 1 | 80-90 or | 22 | 73 |
| | 201-242 | | |
| 1 | 80-90 or | 22 | 74 |
| | 201-242 | | |
| 1 | 80-90 or | 22 | 756 and 757 |
| | 201-242 | | |
| 1 | 80-90 or | 23 | 70 |
| | 201-242 | | |
| 1 | 80-90 or | 23 | 71 |
| | 201-242 | | |
| 1 | 80-90 or | 23 | 72 |
| | 201-242 | | |
| 1 | 80-90 or | 23 | 73 |
| | 201-242 | | |
| 1 | 80-90 or | 23 | 74 |
| | 201-242 | | |
| 1 | 80-90 or | 23 | 756 and 757 |
| | 201-242 | | |
| 1 | 80-90 or | 24 | 70 |
| | 201-242 | | |
| 1 | 80-90 or | 24 | 71 |
| | 201-242 | | |
| 1 | 80-90 or | 24 | 72 |
| | 201-242 | | |
| 1 | 80-90 or | 24 | 73 |
| | 201-242 | | |
| 1 | 80-90 or | 24 | 74 |
| | 201-242 | | |
| 1 | 80-90 or | 24 | 756 and 757 |
| | 201-242 | | |
| 1 | 80-90 or | 25 | 70 |
| | 201-242 | | |
| 1 | 80-90 or | 25 | 71 |
| | 201-242 | | |
| 1 | 80-90 or | 25 | 72 |
| | 201-242 | | |
| 1 | 80-90 or | 25 | 73 |
| | 201-242 | | |
| 1 | 80-90 or | 25 | 74 |
| | 201-242 | | |
| 1 | 80-90 or | 25 | 756 and 757 |
| | 201-242 | | |
| 1 | 80-90 or | 26 | 70 |
| | 201-242 | | |
| 1 | 80-90 or | 26 | 71 |
| | 201-242 | | |
| 1 | 80-90 or | 26 | 72 |
| | 201-242 | | |
| 1 | 80-90 or | 26 | 73 |
| | 201-242 | | |
| 1 | 80-90 or | 26 | 74 |
| | 201-242 | | |
| 1 | 80-90 or | 26 | 756 and 757 |
| | 201-242 | | |
| 1 | 80-90 or | 27 | 70 |
| | 201-242 | | |
| 1 | 80-90 or | 27 | 71 |
| | 201-242 | | |
| 1 | 80-90 or | 27 | 72 |
| | 201-242 | | |
| 1 | 80-90 or | 27 | 73 |
| | 201-242 | | |
| 1 | 80-90 or | 27 | 74 |
| | 201-242 | | |
| 1 | 80-90 or | 27 | 756 and 757 |
| | 201-242 | | |
| 1 | 80-90 or | 28 | 70 |
| | 201-242 | | |
| 1 | 80-90 or | 28 | 71 |
| | 201-242 | | |
| 1 | 80-90 or | 28 | 72 |
| | 201-242 | | |
| 1 | 80-90 or | 28 | 73 |
| | 201-242 | | |
| 1 | 80-90 or | 28 | 74 |
| | 201-242 | | |
| 1 | 80-90 or | 28 | 756 and 757 |
| | 201-242 | | |
| 1 | 80-90 or | 29 | 70 |
| | 201-242 | | |
| 1 | 80-90 or | 29 | 71 |
| | 201-242 | | |
| 1 | 80-90 or | 29 | 72 |
| | 201-242 | | |
| 1 | 80-90 or | 29 | 73 |
| | 201-242 | | |
| 1 | 80-90 or | 29 | 74 |
| | 201-242 | | |
| 1 | 80-90 or | 29 | 756 and 757 |
| | 201-242 | | |
| 1 | 80-90 or | 30 | 70 |
| | 201-242 | | |
| 1 | 80-90 or | 30 | 71 |
| | 201-242 | | |
| 1 | 80-90 or | 30 | 72 |
| | 201-242 | | |
| 1 | 80-90 or | 30 | 73 |
| | 201-242 | | |
| 1 | 80-90 or | 30 | 74 |
| | 201-242 | | |
| 1 | 80-90 or | 30 | 756 and 757 |
| | 201-242 | | |
| 1 | 80-90 or | 31 | 70 |
| | 201-242 | | |
| 1 | 80-90 or | 31 | 71 |
| | 201-242 | | |
| 1 | 80-90 or | 31 | 72 |
| | 201-242 | | |
| 1 | 80-90 or | 31 | 73 |
| | 201-242 | | |
| 1 | 80-90 or | 31 | 74 |
| | 201-242 | | |
| 1 | 80-90 or | 31 | 756 and 757 |
| | 201-242 | | |
| 1 | 80-90 or | 32 and 33 | 70 |
| | 201-242 | | |
| 1 | 80-90 or | 32 and 33 | 71 |
| | 201-242 | | |
| 1 | 80-90 or | 32 and 33 | 72 |
| | 201-242 | | |
| 1 | 80-90 or | 32 and 33 | 73 |
| | 201-242 | | |
| 1 | 80-90 or | 32 and 33 | 74 |
| | 201-242 | | |
| 1 | 80-90 or | 32 and 33 | 756 and 757 |
| | 201-242 | | |
| 1 | 80-90 or | 40 | 70 |
| | 201-242 | | |
| 1 | 80-90 or | 40 | 71 |
| | 201-242 | | |
| 1 | 80-90 or | 40 | 72 |
| | 201-242 | | |
| 1 | 80-90 or | 40 | 73 |
| | 201-242 | | |
| 1 | 80-90 or | 40 | 74 |
| | 201-242 | | |
| 1 | 80-90 or | 40 | 756 and 757 |
| | 201-242 | | |
| 1 | 80-90 or | 41 | 70 |
| | 201-242 | | |
| 1 | 80-90 or | 41 | 71 |
| | 201-242 | | |
| 1 | 80-90 or | 41 | 72 |
| | 201-242 | | |
| 1 | 80-90 or | 41 | 73 |
| | 201-242 | | |
| 1 | 80-90 or | 41 | 74 |
| | 201-242 | | |
| 1 | 80-90 or | 41 | 756 and 757 |
| | 201-242 | | |
| 1 | 80-90 or | 42 | 70 |
| | 201-242 | | |
| 1 | 80-90 or | 42 | 71 |
| | 201-242 | | |
| 1 | 80-90 or | 42 | 72 |
| | 201-242 | | |
| 1 | 80-90 or | 42 | 73 |
| | 201-242 | | |
| 1 | 80-90 or | 42 | 74 |
| | 201-242 | | |
| 1 | 80-90 or | 42 | 756 and 757 |
| | 201-242 | | |
| 1 | 80-90 or | 43 | 70 |
| | 201-242 | | |
| 1 | 80-90 or | 43 | 71 |
| | 201-242 | | |
| 1 | 80-90 or | 43 | 72 |
| | 201-242 | | |
| 1 | 80-90 or | 43 | 73 |
| | 201-242 | | |
| 1 | 80-90 or | 43 | 74 |
| | 201-242 | | |
| 1 | 80-90 or | 43 | 756 and 757 |
| | 201-242 | | |
| 1 | 80-90 or | 44 | 70 |
| | 201-242 | | |
| 1 | 80-90 or | 44 | 71 |
| | 201-242 | | |
| 1 | 80-90 or | 44 | 72 |
| | 201-242 | | |
| 1 | 80-90 or | 44 | 73 |
| | 201-242 | | |
| 1 | 80-90 or | 44 | 74 |
| | 201-242 | | |
| 1 | 80-90 or | 44 | 756 and 757 |
| | 201-242 | | |
| 1 | 80-90 or | 45 | 70 |
| | 201-242 | | |
| 1 | 80-90 or | 45 | 71 |
| | 201-242 | | |
| 1 | 80-90 or | 45 | 72 |
| | 201-242 | | |
| 1 | 80-90 or | 45 | 73 |
| | 201-242 | | |
| 1 | 80-90 or | 45 | 74 |
| | 201-242 | | |
| 1 | 80-90 or | 45 | 756 and 757 |
| | 201-242 | | |
| 1 | 80-90 or | 46 | 70 |
| | 201-242 | | |
| 1 | 80-90 or | 46 | 71 |
| | 201-242 | | |
| 1 | 80-90 or | 46 | 72 |
| | 201-242 | | |
| 1 | 80-90 or | 46 | 73 |
| | 201-242 | | |
| 1 | 80-90 or | 46 | 74 |
| | 201-242 | | |
| 1 | 80-90 or | 46 | 756 and 757 |
| | 201-242 | | |
| 1 | 80-90 or | 47 | 70 |
| | 201-242 | | |
| 1 | 80-90 or | 47 | 71 |
| | 201-242 | | |
| 1 | 80-90 or | 47 | 72 |
| | 201-242 | | |
| 1 | 80-90 or | 47 | 73 |
| | 201-242 | | |
| 1 | 80-90 or | 47 | 74 |
| | 201-242 | | |
| 1 | 80-90 or | 47 | 756 and 757 |
| | 201-242 | | |
| 1 | 80-90 or | 48 | 70 |
| | 201-242 | | |
| 1 | 80-90 or | 48 | 71 |
| | 201-242 | | |
| 1 | 80-90 or | 48 | 72 |
| | 201-242 | | |
| 1 | 80-90 or | 48 | 73 |
| | 201-242 | | |
| 1 | 80-90 or | 48 | 74 |
| | 201-242 | | |
| 1 | 80-90 or | 48 | 756 and 757 |
| | 201-242 | | |
| 1 | 80-90 or | 49 | 70 |
| | 201-242 | | |
| 1 | 80-90 or | 49 | 71 |
| | 201-242 | | |
| 1 | 80-90 or | 49 | 72 |
| | 201-242 | | |
| 1 | 80-90 or | 49 | 73 |
| | 201-242 | | |
| 1 | 80-90 or | 49 | 74 |
| | 201-242 | | |
| 1 | 80-90 or | 49 | 756 and 757 |
| | 201-242 | | |
| 1 | 80-90 or | 50 | 70 |
| | 201-242 | | |
| 1 | 80-90 or | 50 | 71 |
| | 201-242 | | |
| 1 | 80-90 or | 50 | 72 |
| | 201-242 | | |
| 1 | 80-90 or | 50 | 73 |
| | 201-242 | | |
| 1 | 80-90 or | 50 | 74 |
| | 201-242 | | |
| 1 | 80-90 or | 50 | 756 and 757 |
| | 201-242 | | |
| 1 | 80-90 or | 51 | 70 |
| | 201-242 | | |
| 1 | 80-90 or | 51 | 71 |
| | 201-242 | | |
| 1 | 80-90 or | 51 | 72 |
| | 201-242 | | |
| 1 | 80-90 or | 51 | 73 |
| | 201-242 | | |
| 1 | 80-90 or | 51 | 74 |
| | 201-242 | | |
| 1 | 80-90 or | 51 | 756 and 757 |
| | 201-242 | | |
| 1 | 80-90 or | 747 | 70 |
| | 201-242 | | |
| 1 | 80-90 or | 747 | 71 |
| | 201-242 | | |
| 1 | 80-90 or | 747 | 72 |
| | 201-242 | | |
| 1 | 80-90 or | 747 | 73 |
| | 201-242 | | |
| 1 | 80-90 or | 747 | 74 |
| | 201-242 | | |
| 1 | 80-90 or | 747 | 756 and 757 |
| | 201-242 | | |
| 1 | 80-90 or | 748 and 749 | 70 |
| | 201-242 | | |
| 1 | 80-90 or | 748 and 749 | 71 |
| | 201-242 | | |
| 1 | 80-90 or | 748 and 749 | 72 |
| | 201-242 | | |
| 1 | 80-90 or | 748 and 749 | 73 |
| | 201-242 | | |
| 1 | 80-90 or | 748 and 749 | 74 |
| | 201-242 | | |
| 1 | 80-90 or | 748 and 749 | 756 and 757 |
| | 201-242 | | |
| 2 | 80-90 or | 10 | |
| | 201-242 | | |
| 2 | 80-90 or | 11 | |
| | 201-242 | | |
| 2 | 80-90 or | 12 | |
| | 201-242 | | |
| 2 | 80-90 or | 13 | |
| | 201-242 | | |
| 2 | 80-90 or | 14 | |
| | 201-242 | | |
| 2 | 80-90 or | 15 | |
| | 201-242 | | |
| 2 | 80-90 or | 16 | |
| | 201-242 | | |
| 2 | 80-90 or | 20 | |
| | 201-242 | | |
| 2 | 80-90 or | 21 | |
| | 201-242 | | |
| 2 | 80-90 or | 22 | |
| | 201-242 | | |
| 2 | 80-90 or | 23 | |
| | 201-242 | | |
| 2 | 80-90 or | 24 | |
| | 201-242 | | |
| 2 | 80-90 or | 25 | |
| | 201-242 | | |
| 2 | 80-90 or | 26 | |
| | 201-242 | | |
| 2 | 80-90 or | 27 | |
| | 201-242 | | |
| 2 | 80-90 or | 28 | |
| | 201-242 | | |
| 2 | 80-90 or | 29 | |
| | 201-242 | | |
| 2 | 80-90 or | 30 | |
| | 201-242 | | |
| 2 | 80-90 or | 31 | |
| | 201-242 | | |
| 2 | 80-90 or | 32 and 33 | |
| | 201-242 | | |
| 2 | 80-90 or | 40 | |
| | 201-242 | | |
| 2 | 80-90 or | 41 | |
| | 201-242 | | |
| 2 | 80-90 or | 42 | |
| | 201-242 | | |
| 2 | 80-90 or | 43 | |
| | 201-242 | | |
| 2 | 80-90 or | 44 | |
| | 201-242 | | |
| 2 | 80-90 or | 45 | |
| | 201-242 | | |
| 2 | 80-90 or | 46 | |
| | 201-242 | | |
| 2 | 80-90 or | 47 | |
| | 201-242 | | |
| 2 | 80-90 or | 48 | |
| | 201-242 | | |
| 2 | 80-90 or | 49 | |
| | 201-242 | | |
| 2 | 80-90 or | 50 | |
| | 201-242 | | |
| 2 | 80-90 or | 51 | |
| | 201-242 | | |
| 2 | 80-90 or | 747 | |
| | 201-242 | | |
| 2 | 80-90 or | 748 and 749 | |
| | 201-242 | | |
| 2 | 80-90 or | 10 | 70 |
| | 201-242 | | |
| 2 | 80-90 or | 10 | 71 |
| | 201-242 | | |
| 2 | 80-90 or | 10 | 72 |
| | 201-242 | | |
| 2 | 80-90 or | 10 | 73 |
| | 201-242 | | |
| 2 | 80-90 or | 10 | 74 |
| | 201-242 | | |
| 2 | 80-90 or | 10 | 756 and 757 |
| | 201-242 | | |
| 2 | 80-90 or | 11 | 70 |
| | 201-242 | | |
| 2 | 80-90 or | 11 | 71 |
| | 201-242 | | |
| 2 | 80-90 or | 11 | 72 |
| | 201-242 | | |
| 2 | 80-90 or | 11 | 73 |
| | 201-242 | | |
| 2 | 80-90 or | 11 | 74 |
| | 201-242 | | |
| 2 | 80-90 or | 11 | 756 and 757 |
| | 201-242 | | |
| 2 | 80-90 or | 12 | 70 |
| | 201-242 | | |
| 2 | 80-90 or | 12 | 71 |
| | 201-242 | | |
| 2 | 80-90 or | 12 | 72 |
| | 201-242 | | |
| 2 | 80-90 or | 12 | 73 |
| | 201-242 | | |
| 2 | 80-90 or | 12 | 74 |
| | 201-242 | | |
| 2 | 80-90 or | 12 | 756 and 757 |
| | 201-242 | | |
| 2 | 80-90 or | 13 | 70 |
| | 201-242 | | |
| 2 | 80-90 or | 13 | 71 |
| | 201-242 | | |
| 2 | 80-90 or | 13 | 72 |
| | 201-242 | | |
| 2 | 80-90 or | 13 | 73 |
| | 201-242 | | |
| 2 | 80-90 or | 13 | 74 |
| | 201-242 | | |
| 2 | 80-90 or | 13 | 756 and 757 |
| | 201-242 | | |
| 2 | 80-90 or | 14 | 70 |
| | 201-242 | | |
| 2 | 80-90 or | 14 | 71 |
| | 201-242 | | |
| 2 | 80-90 or | 14 | 72 |
| | 201-242 | | |
| 2 | 80-90 or | 14 | 73 |
| | 201-242 | | |
| 2 | 80-90 or | 14 | 74 |
| | 201-242 | | |
| 2 | 80-90 or | 14 | 756 and 757 |
| | 201-242 | | |
| 2 | 80-90 or | 15 | 70 |
| | 201-242 | | |
| 2 | 80-90 or | 15 | 71 |
| | 201-242 | | |
| 2 | 80-90 or | 15 | 72 |
| | 201-242 | | |
| 2 | 80-90 or | 15 | 73 |
| | 201-242 | | |
| 2 | 80-90 or | 15 | 74 |
| | 201-242 | | |
| 2 | 80-90 or | 15 | 756 and 757 |
| | 201-242 | | |
| 2 | 80-90 or | 16 | 70 |
| | 201-242 | | |
| 2 | 80-90 or | 16 | 71 |
| | 201-242 | | |
| 2 | 80-90 or | 16 | 72 |
| | 201-242 | | |
| 2 | 80-90 or | 16 | 73 |
| | 201-242 | | |
| 2 | 80-90 or | 16 | 74 |
| | 201-242 | | |
| 2 | 80-90 or | 16 | 756 and 757 |
| | 201-242 | | |
| 2 | 80-90 or | 20 | 70 |
| | 201-242 | | |
| 2 | 80-90 or | 20 | 71 |
| | 201-242 | | |
| 2 | 80-90 or | 20 | 72 |
| | 201-242 | | |
| 2 | 80-90 or | 20 | 73 |
| | 201-242 | | |
| 2 | 80-90 or | 20 | 74 |
| | 201-242 | | |
| 2 | 80-90 or | 20 | 756 and 757 |
| | 201-242 | | |
| 2 | 80-90 or | 21 | 70 |
| | 201-242 | | |
| 2 | 80-90 or | 21 | 71 |
| | 201-242 | | |
| 2 | 80-90 or | 21 | 72 |
| | 201-242 | | |
| 2 | 80-90 or | 21 | 73 |
| | 201-242 | | |
| 2 | 80-90 or | 21 | 74 |
| | 201-242 | | |
| 2 | 80-90 or | 21 | 756 and 757 |
| | 201-242 | | |
| 2 | 80-90 or | 22 | 70 |
| | 201-242 | | |
| 2 | 80-90 or | 22 | 71 |
| | 201-242 | | |
| 2 | 80-90 or | 22 | 72 |
| | 201-242 | | |
| 2 | 80-90 or | 22 | 73 |
| | 201-242 | | |
| 2 | 80-90 or | 22 | 74 |
| | 201-242 | | |
| 2 | 80-90 or | 22 | 756 and 757 |
| | 201-242 | | |
| 2 | 80-90 or | 23 | 70 |
| | 201-242 | | |
| 2 | 80-90 or | 23 | 71 |
| | 201-242 | | |
| 2 | 80-90 or | 23 | 72 |
| | 201-242 | | |
| 2 | 80-90 or | 23 | 73 |
| | 201-242 | | |
| 2 | 80-90 or | 23 | 74 |
| | 201-242 | | |
| 2 | 80-90 or | 23 | 756 and 757 |
| | 201-242 | | |
| 2 | 80-90 or | 24 | 70 |
| | 201-242 | | |
| 2 | 80-90 or | 24 | 71 |
| | 201-242 | | |
| 2 | 80-90 or | 24 | 72 |
| | 201-242 | | |
| 2 | 80-90 or | 24 | 73 |
| | 201-242 | | |
| 2 | 80-90 or | 24 | 74 |
| | 201-242 | | |
| 2 | 80-90 or | 24 | 756 and 757 |
| | 201-242 | | |
| 2 | 80-90 or | 25 | 70 |
| | 201-242 | | |
| 2 | 80-90 or | 25 | 71 |
| | 201-242 | | |
| 2 | 80-90 or | 25 | 72 |
| | 201-242 | | |
| 2 | 80-90 or | 25 | 73 |
| | 201-242 | | |
| 2 | 80-90 or | 25 | 74 |
| | 201-242 | | |
| 2 | 80-90 or | 25 | 756 and 757 |
| | 201-242 | | |
| 2 | 80-90 or | 26 | 70 |
| | 201-242 | | |
| 2 | 80-90 or | 26 | 71 |
| | 201-242 | | |
| 2 | 80-90 or | 26 | 72 |
| | 201-242 | | |
| 2 | 80-90 or | 26 | 73 |
| | 201-242 | | |
| 2 | 80-90 or | 26 | 74 |
| | 201-242 | | |
| 2 | 80-90 or | 26 | 756 and 757 |
| | 201-242 | | |
| 2 | 80-90 or | 27 | 70 |
| | 201-242 | | |
| 2 | 80-90 or | 27 | 71 |
| | 201-242 | | |
| 2 | 80-90 or | 27 | 72 |
| | 201-242 | | |
| 2 | 80-90 or | 27 | 73 |
| | 201-242 | | |
| 2 | 80-90 or | 27 | 74 |
| | 201-242 | | |
| 2 | 80-90 or | 27 | 756 and 757 |
| | 201-242 | | |
| 2 | 80-90 or | 28 | 70 |
| | 201-242 | | |
| 2 | 80-90 or | 28 | 71 |
| | 201-242 | | |
| 2 | 80-90 or | 28 | 72 |
| | 201-242 | | |
| 2 | 80-90 or | 28 | 73 |
| | 201-242 | | |
| 2 | 80-90 or | 28 | 74 |
| | 201-242 | | |
| 2 | 80-90 or | 28 | 756 and 757 |
| | 201-242 | | |
| 2 | 80-90 or | 29 | 70 |
| | 201-242 | | |
| 2 | 80-90 or | 29 | 71 |
| | 201-242 | | |
| 2 | 80-90 or | 29 | 72 |
| | 201-242 | | |
| 2 | 80-90 or | 29 | 73 |
| | 201-242 | | |
| 2 | 80-90 or | 29 | 74 |
| | 201-242 | | |
| 2 | 80-90 or | 29 | 756 and 757 |
| | 201-242 | | |
| 2 | 80-90 or | 30 | 70 |
| | 201-242 | | |
| 2 | 80-90 or | 30 | 71 |
| | 201-242 | | |
| 2 | 80-90 or | 30 | 72 |
| | 201-242 | | |
| 2 | 80-90 or | 30 | 73 |
| | 201-242 | | |
| 2 | 80-90 or | 30 | 74 |
| | 201-242 | | |
| 2 | 80-90 or | 30 | 756 and 757 |
| | 201-242 | | |
| 2 | 80-90 or | 31 | 70 |
| | 201-242 | | |
| 2 | 80-90 or | 31 | 71 |
| | 201-242 | | |
| 2 | 80-90 or | 31 | 72 |
| | 201-242 | | |
| 2 | 80-90 or | 31 | 73 |
| | 201-242 | | |
| 2 | 80-90 or | 31 | 74 |
| | 201-242 | | |
| 2 | 80-90 or | 31 | 756 and 757 |
| | 201-242 | | |
| 2 | 80-90 or | 32 and 33 | 70 |
| | 201-242 | | |
| 2 | 80-90 or | 32 and 33 | 71 |
| | 201-242 | | |
| 2 | 80-90 or | 32 and 33 | 72 |
| | 201-242 | | |
| 2 | 80-90 or | 32 and 33 | 73 |
| | 201-242 | | |
| 2 | 80-90 or | 32 and 33 | 74 |
| | 201-242 | | |
| 2 | 80-90 or | 32 and 33 | 756 and 757 |
| | 201-242 | | |
| 2 | 80-90 or | 40 | 70 |
| | 201-242 | | |
| 2 | 80-90 or | 40 | 71 |
| | 201-242 | | |
| 2 | 80-90 or | 40 | 72 |
| | 201-242 | | |
| 2 | 80-90 or | 40 | 73 |
| | 201-242 | | |
| 2 | 80-90 or | 40 | 74 |
| | 201-242 | | |
| 2 | 80-90 or | 40 | 756 and 757 |
| | 201-242 | | |
| 2 | 80-90 or | 41 | 70 |
| | 201-242 | | |
| 2 | 80-90 or | 41 | 71 |
| | 201-242 | | |
| 2 | 80-90 or | 41 | 72 |
| | 201-242 | | |
| 2 | 80-90 or | 41 | 73 |
| | 201-242 | | |
| 2 | 80-90 or | 41 | 74 |
| | 201-242 | | |
| 2 | 80-90 or | 41 | 756 and 757 |
| | 201-242 | | |
| 2 | 80-90 or | 42 | 70 |
| | 201-242 | | |
| 2 | 80-90 or | 42 | 71 |
| | 201-242 | | |
| 2 | 80-90 or | 42 | 72 |
| | 201-242 | | |
| 2 | 80-90 or | 42 | 73 |
| | 201-242 | | |
| 2 | 80-90 or | 42 | 74 |
| | 201-242 | | |
| 2 | 80-90 or | 42 | 756 and 757 |
| | 201-242 | | |
| 2 | 80-90 or | 43 | 70 |
| | 201-242 | | |
| 2 | 80-90 or | 43 | 71 |
| | 201-242 | | |
| 2 | 80-90 or | 43 | 72 |
| | 201-242 | | |
| 2 | 80-90 or | 43 | 73 |
| | 201-242 | | |
| 2 | 80-90 or | 43 | 74 |
| | 201-242 | | |
| 2 | 80-90 or | 43 | 756 and 757 |
| | 201-242 | | |
| 2 | 80-90 or | 44 | 70 |
| | 201-242 | | |
| 2 | 80-90 or | 44 | 71 |
| | 201-242 | | |
| 2 | 80-90 or | 44 | 72 |
| | 201-242 | | |
| 2 | 80-90 or | 44 | 73 |
| | 201-242 | | |
| 2 | 80-90 or | 44 | 74 |
| | 201-242 | | |
| 2 | 80-90 or | 44 | 756 and 757 |
| | 201-242 | | |
| 2 | 80-90 or | 45 | 70 |
| | 201-242 | | |
| 2 | 80-90 or | 45 | 71 |
| | 201-242 | | |
| 2 | 80-90 or | 45 | 72 |
| | 201-242 | | |
| 2 | 80-90 or | 45 | 73 |
| | 201-242 | | |
| 2 | 80-90 or | 45 | 74 |
| | 201-242 | | |
| 2 | 80-90 or | 45 | 756 and 757 |
| | 201-242 | | |
| 2 | 80-90 or | 46 | 70 |
| | 201-242 | | |
| 2 | 80-90 or | 46 | 71 |
| | 201-242 | | |
| 2 | 80-90 or | 46 | 72 |
| | 201-242 | | |
| 2 | 80-90 or | 46 | 73 |
| | 201-242 | | |
| 2 | 80-90 or | 46 | 74 |
| | 201-242 | | |
| 2 | 80-90 or | 46 | 756 and 757 |
| | 201-242 | | |
| 2 | 80-90 or | 47 | 70 |
| | 201-242 | | |
| 2 | 80-90 or | 47 | 71 |
| | 201-242 | | |
| 2 | 80-90 or | 47 | 72 |
| | 201-242 | | |
| 2 | 80-90 or | 47 | 73 |
| | 201-242 | | |
| 2 | 80-90 or | 47 | 74 |
| | 201-242 | | |
| 2 | 80-90 or | 47 | 756 and 757 |
| | 201-242 | | |
| 2 | 80-90 or | 48 | 70 |
| | 201-242 | | |
| 2 | 80-90 or | 48 | 71 |
| | 201-242 | | |
| 2 | 80-90 or | 48 | 72 |
| | 201-242 | | |
| 2 | 80-90 or | 48 | 73 |
| | 201-242 | | |
| 2 | 80-90 or | 48 | 74 |
| | 201-242 | | |
| 2 | 80-90 or | 48 | 756 and 757 |
| | 201-242 | | |
| 2 | 80-90 or | 49 | 70 |
| | 201-242 | | |
| 2 | 80-90 or | 49 | 71 |
| | 201-242 | | |
| 2 | 80-90 or | 49 | 72 |
| | 201-242 | | |
| 2 | 80-90 or | 49 | 73 |
| | 201-242 | | |
| 2 | 80-90 or | 49 | 74 |
| | 201-242 | | |
| 2 | 80-90 or | 49 | 756 and 757 |
| | 201-242 | | |
| 2 | 80-90 or | 50 | 70 |
| | 201-242 | | |
| 2 | 80-90 or | 50 | 71 |
| | 201-242 | | |
| 2 | 80-90 or | 50 | 72 |
| | 201-242 | | |
| 2 | 80-90 or | 50 | 73 |
| | 201-242 | | |
| 2 | 80-90 or | 50 | 74 |
| | 201-242 | | |
| 2 | 80-90 or | 50 | 756 and 757 |
| | 201-242 | | |
| 2 | 80-90 or | 51 | 70 |
| | 201-242 | | |
| 2 | 80-90 or | 51 | 71 |
| | 201-242 | | |
| 2 | 80-90 or | 51 | 72 |
| | 201-242 | | |
| 2 | 80-90 or | 51 | 73 |
| | 201-242 | | |
| 2 | 80-90 or | 51 | 74 |
| | 201-242 | | |
| 2 | 80-90 or | 51 | 756 and 757 |
| | 201-242 | | |
| 2 | 80-90 or | 747 | 70 |
| | 201-242 | | |
| 2 | 80-90 or | 747 | 71 |
| | 201-242 | | |
| 2 | 80-90 or | 747 | 72 |
| | 201-242 | | |
| 2 | 80-90 or | 747 | 73 |
| | 201-242 | | |
| 2 | 80-90 or | 747 | 74 |
| | 201-242 | | |
| 2 | 80-90 or | 747 | 756 and 757 |
| | 201-242 | | |
| 2 | 80-90 or | 748 and 749 | 70 |
| | 201-242 | | |
| 2 | 80-90 or | 748 and 749 | 71 |
| | 201-242 | | |
| 2 | 80-90 or | 748 and 749 | 72 |
| | 201-242 | | |
| 2 | 80-90 or | 748 and 749 | 73 |
| | 201-242 | | |
| 2 | 80-90 or | 748 and 749 | 74 |
| | 201-242 | | |
| 2 | 80-90 or | 748 and 749 | 756 and 757 |
| | 201-242 | | |

[0247] Additionally, any cytokine prodrug described herein, in Table 3A or elsewhere, may further comprise a targeting sequence, such as any of the targeting sequences described herein. In some embodiments, the targeting sequence is any one of SEQ ID NOs: 180-662.

[0248] Additionally, any one of the cytokine prodrugs described in Table 3A may comprise a consensus sequence according to any one of SEQ ID NOs: 91-94 in place of the listed protease-cleavable sequences.

[0249] Also encompassed by this disclosure are cytokine prodrugs comprising a sequence with at least 80, 85, 90, 95, 97, 98, or 99 percent identity to the sequence of any one of the cytokine prodrugs described above.

[0250] In some embodiments, the cytokine prodrug comprises a sequence with at least 80, 85, 90, 95, 97, 98, or 99 percent identity to the sequence of any one of SEQ ID NOs: 100-111. In some embodiments, the cytokine prodrug comprises the sequence of any one of SEQ ID NOs: 100-111. In some embodiments, the cytokine prodrug comprises the sequence of any one of SEQ ID NOs: 803-852.

[0251] Combinations of a Protease-Cleavable Sequence and a Targeting Sequence

[0252] Any compatible embodiment of a cytokine prodrug described herein, in Table 3A or elsewhere, may comprise a combination of a protease-cleavable sequence and a targeting sequence set forth in Table 4. Where a range is given, any one of the listed SEQ ID NOs may be selected. The components may be arranged in any manner consistent with the disclosure, e.g., as indicated elsewhere herein (e.g., FIGS. 9 and 10A-E and the section regarding Arrangement of components).

TABLE 4
Exemplary combinations of protease-cleavable
sequence and targeting sequence

| Protease-cleavable sequence | Targeting sequence |
|---|---|
| 80 | 180-662 |
| 81 | 180-662 |
| 82 | 180-662 |
| 83 | 180-662 |
| 84 | 180-662 |
| 85 | 180-662 |
| 86 | 180-662 |
| 87 | 180-662 |
| 88 | 180-662 |
| 89 | 180-662 |
| 90 | 180-662 |
| 91 | 180-662 |
| 92 | 180-662 |
| 93 | 180-662 |
| 94 | 180-662 |
| 700 | 180-662 |
| 701 | 180-662 |
| 702 | 180-662 |
| 703 | 180-662 |
| 704 | 180-662 |
| 705 | 180-662 |
| 706 | 180-662 |
| 707 | 180-662 |
| 708 | 180-662 |
| 709 | 180-662 |
| 710 | 180-662 |
| 711 | 180-662 |
| 712 | 180-662 |
| 713 | 180-662 |
| 714 | 180-662 |
| 715 | 180-662 |
| 716 | 180-662 |
| 717 | 180-662 |
| 718 | 180-662 |
| 719 | 180-662 |
| 720 | 180-662 |
| 721 | 180-662 |
| 722 | 180-662 |
| 723 | 180-662 |
| 724 | 180-662 |
| 725 | 180-662 |
| 726 | 180-662 |
| 727 | 180-662 |
| 728 | 180-662 |
| 729 | 180-662 |
| 730 | 180-662 |
| 731 | 180-662 |
| 732 | 180-662 |
| 733 | 180-662 |
| 734 | 180-662 |
| 735 | 180-662 |
| 736 | 180-662 |
| 737 | 180-662 |
| 738 | 180-662 |
| 739 | 180-662 |
| 740 | 180-662 |
| 741 | 180-662 |

[0253] Also encompassed by this disclosure are cytokine prodrugs comprising a sequence with at least 80, 85, 90, 95, 97, 98, or 99 percent identity to the sequence of any one of the cytokine prodrugs described above.

### Pharmaceutical Formulations

[0254] Pharmaceutical formulations of a cytokine prodrug as described herein may be prepared by mixing such cytokine prodrug having the desired degree of purity with one or more optional pharmaceutically acceptable carriers (Remington's Pharmaceutical Sciences 16th edition, Osol, A. Ed. (1980)), in the form of lyophilized formulations or aqueous solutions. Pharmaceutically acceptable carriers are generally nontoxic to recipients at the dosages and concentrations employed, and include, but are not limited to: buffers such as phosphate, citrate, and other organic acids; antioxidants including ascorbic acid and methionine; preservatives (such as octadecyldimethylbenzyl ammonium chloride; hexamethonium chloride; benzalkonium chloride; benzethonium chloride; phenol, butyl or benzyl alcohol; alkyl parabens such as methyl or propyl paraben; catechol; resorcinol; cyclohexanol; 3-pentanol; and m-cresol); low molecular weight (less than about 10 residues) polypeptides; proteins, such as serum albumin, gelatin, or immunoglobulins; hydrophilic polymers such as polyvinylpyrrolidone; amino acids such as glycine, glutamine, asparagine, histidine, arginine, or lysine; monosaccharides, disaccharides, and other carbohydrates including glucose, mannose, or dextrins; chelating agents such as EDTA; sugars such as sucrose, mannitol, trehalose or sorbitol; salt-forming counter-ions such as sodium; metal complexes (e.g. Zn-protein complexes); and/or non-ionic surfactants such as polyethylene glycol (PEG).

[0255] The formulations to be used for in vivo administration are generally sterile. Sterility may be readily accomplished, e.g., by filtration through sterile filtration membranes.

### Uses

[0256] In some embodiments, any one or more of the cytokine prodrugs, compositions, or pharmaceutical formulations described herein is for use in preparing a medicament for treating or preventing a disease or disorder in a subject. In some embodiments, any one or more of the cytokine prodrugs, compositions, or pharmaceutical formulations described herein is for use in a method of creating a cytokine gradient in a subject, comprising administering the protease-activated pro-cytokine or pharmaceutical composition to a subject, wherein the subject comprises a site having an abnormally high level of a protease that cleaves the protease-cleavable polypeptide sequence, optionally wherein the site comprises a cancer. In some embodiments, the abnormally high level is higher than the level of the protease in a healthy tissue of the same type as the site with the abnormally high level (e.g., in the subject being treated or in a healthy subject). In some embodiments, the abnormally high level is higher than the average level of the protease in soft tissue.

[0257] In some embodiments, a method of treating or preventing a disease or disorder in subject is provided, comprising administering to a subject any of the cytokine prodrugs or pharmaceutical compositions described herein. In some embodiments, the disease or disorder is a cancer, e.g., a solid tumor. In some embodiments, the cancer is a melanoma, a colorectal cancer, a breast cancer, a pancreatic cancer, a lung cancer, a prostate cancer, an ovarian cancer, a cervical cancer, a gastric or gastrointestinal cancer, a lymphoma, a colon or colorectal cancer, an endometrial cancer, a thyroid cancer, or a bladder cancer. The cancer (e.g., any of the foregoing cancers) may have one or more of the following features: being PD-L1-positive; being metastatic; being unresectable; being mismatch repair defective (MMRd); and/or being microsatellite-instability high (MSI-H).

[0258] In some embodiments, a method of boosting T regulatory cells and/or reducing inflammation or autoimmune activity is provided comprising administering a cytokine prodrug to an area of interest, e.g., an area of inflammation. The cytokine prodrug for use in such methods may comprise an IL-2 polypeptide sequence. In some embodiments, a method of treating an autoimmune and/or inflammatory disease is provided, comprising administering a cytokine prodrug to an area of interest, e.g., an area of inflammation or autoimmune activity. The cytokine prodrug for use in such methods may comprise an IL-2 polypeptide sequence. These methods take advantage of the ability of certain cytokines at relatively low levels to stimulate T regulatory cells, which can exert anti-inflammatory effects and reduce or suppress autoimmune activity.

[0259] The cytokine prodrugs in any of the foregoing methods and uses may be delivered to a subject using any suitable route of administration. In some embodiments, the cytokine prodrug is delivered parenterally. In some embodiments, the cytokine prodrug is delivered intravenously.

[0260] A cytokine prodrug provided herein can be used either alone or in combination with other agents in a therapy. For instance, a cytokine prodrug provided herein may be co-administered with at least one additional therapeutic agent.

[0261] Such combination therapies noted above encompass combined administration (where two or more therapeutic agents are included in the same or separate formulations), and separate administration, in which case, administration of the cytokine prodrug provided herein can occur prior to, simultaneously, and/or following, administration of the additional therapeutic agent and/or adjuvant.

[0262] Cytokine prodrugs would be formulated, dosed, and administered in a fashion consistent with good medical practice. Factors for consideration in this context include the particular disorder being treated, the particular mammal being treated, the clinical condition of the individual patient, the cause of the disorder, the site of delivery of the agent, the method of administration, the scheduling of administration, and other factors known to medical practitioners. The cytokine prodrug need not be, but is optionally formulated with one or more agents currently used to prevent or treat the disorder in question. The effective amount of such other agents depends on the amount of cytokine prodrug present in the formulation, the type of disorder or treatment, and other factors discussed above. These are generally used in the same dosages and with administration routes as described herein, or about from 1 to 99% of the dosages described herein, or in any dosage and by any route that is empirically/clinically determined to be appropriate.

[0263] For the prevention or treatment of disease, the appropriate dosage of an cytokine prodrug (when used alone or in combination with one or more other additional therapeutic agents) will depend on the type of disease to be treated, the type of cytokine prodrug, the severity and course of the disease, whether the cytokine prodrug is administered for preventive or therapeutic purposes, previous therapy, the patient's clinical history and response to the antibody or immunoconjugate, and the discretion of the attending physician. The cytokine prodrug is suitably administered to the patient at one time or over a series of treatments.

### Nucleic Acids, Host Cells, and Production Methods

[0264] Cytokine prodrugs or precursors thereof may be produced using recombinant methods and compositions. In some embodiments, isolated nucleic acid encoding a cytokine prodrug described herein is provided. Such nucleic acid may encode an amino acid sequence comprising the cytokine polypeptide sequence, the linker, and the inhibitory polypeptide sequence, and any other polypeptide components of the cytokine prodrug that may be present. Exemplary nucleic acid sequences are provided in Table 1. In a further embodiment, one or more vectors (e.g., expression vectors) comprising such nucleic acid are provided. In a further embodiment, a host cell comprising such nucleic acid is provided. In some such embodiments, a host cell comprises (e.g., has been transformed with) a vector comprising a nucleic acid that encodes a cytokine prodrug according to the disclosure. In some embodiments, the host cell is eukaryotic, e.g. a Chinese Hamster Ovary (CHO) cell or lymphoid cell (e.g., Y0, NS0, Sp20 cell). In some embodiments, a method of making a cytokine prodrug disclosed herein is provided, wherein the method comprises culturing a host cell comprising a nucleic acid encoding the cytokine prodrug, as provided above, under conditions suitable for expression of the cytokine prodrug, and optionally recovering the antibody from the host cell (or host cell culture medium).

[0265] For recombinant production of a cytokine prodrug, nucleic acid encoding the cytokine prodrug, e.g., as described above, is prepared and/or isolated (e.g., following construction using synthetic and/or molecular cloning techniques) and inserted into one or more vectors for further cloning and/or expression in a host cell. Such nucleic acid may be readily prepared and/or isolated using known techniques.

[0266] Suitable host cells for cloning or expression of cytokine prodrug-encoding vectors include prokaryotic or eukaryotic cells described herein. For example, a cytokine prodrug may be produced in bacteria, in particular when glycosylation is not needed. For expression of polypeptides in bacteria, see, e.g., U.S. Pat. Nos. 5,648,237, 5,789,199, and 5,840,523. After expression, the cytokine prodrug may be isolated from the bacterial cell paste in a soluble fraction and can be further purified.

[0267] In addition to prokaryotes, eukaryotic microbes such as filamentous fungi or yeast are suitable cloning or expression hosts for cytokine prodrug-encoding vectors, including fungi and yeast strains whose glycosylation pathways have been “humanized,” resulting in the production of polypeptides with a partially or fully human glycosylation pattern. See Gerngross, Nat. Biotech. 22:1409-1414 (2004), and Li et al., Nat. Biotech. 24:210-215 (2006).

[0268] Suitable host cells for the expression of cytokine prodrugs are also derived from multicellular organisms (plants, invertebrates, and vertebrates). Examples of invertebrate cells include insect cells. Numerous baculoviral strains have been identified which may be used in conjunction with insect cells, particularly for transfection of Spodoptera frugiperda cells.

[0269] Plant cell cultures can also be utilized as hosts. See, e.g., U.S. Pat. Nos. 5,959,177, 6,040,498, 6,420,548, 7,125,978, and 6,417,429.

[0270] Vertebrate cells may also be used as hosts. For example, mammalian cell lines that are adapted to grow in suspension may be useful. Other examples of useful mammalian host cell lines are monkey kidney CV1 line transformed by SV40 (COS-7); human embryonic kidney line (293 or 293 cells as described, e.g., in Graham et al., J. Gen Virol. 36:59 (1977)); baby hamster kidney cells (BHK); mouse sertoli cells (TM4 cells as described, e.g., in Mather, Biol. Reprod. 23:243-251 (1980)); monkey kidney cells (CV1); African green monkey kidney cells (VERO-76); human cervical carcinoma cells (HELA); canine kidney cells (MDCK; buffalo rat liver cells (BRL 3A); human lung cells (W138); human liver cells (Hep G2); mouse mammary tumor (MMT 060562); TRI cells, as described, e.g., in Mather et al., Annals N.Y. Acad. Sci. 383:44-68 (1982); MRC 5 cells; and FS4 cells. Other useful mammalian host cell lines include Chinese hamster ovary (CHO) cells, including DHFR-CHO cells (Urlaub et al., Proc. Natl. Acad. Sci. USA 77:4216 (1980)); and myeloma cell lines such as Y0, NS0 and Sp2/0.

[0271] This description and exemplary embodiments should not be taken as limiting. For the purposes of this specification and appended claims, unless otherwise indicated, all numbers expressing quantities, percentages, or proportions, and other numerical values used in the specification and claims, are to be understood as being modified in all instances by the term “about,” to the extent they are not already so modified. “About” indicates a degree of variation that does not substantially affect the properties of the described subject matter, e.g., within 10%, 5%, 2%, or 1%. Accordingly, unless indicated to the contrary, the numerical parameters set forth in the following specification and attached claims are approximations that may vary depending upon the desired properties sought to be obtained. At the very least, and not as an attempt to limit the application of the doctrine of equivalents to the scope of the claims, each numerical parameter should at least be construed in light of the number of reported significant digits and by applying ordinary rounding techniques.

### EXAMPLES

[0272] The following examples are provided to illustrate certain disclosed embodiments and are not to be construed as limiting the scope of this disclosure in any way.

### Example 1: Construction of Mammalian Expression Vectors Encoding Fusion Proteins

[0273] Coding sequences for all protein domains including linker sequences were synthesized as an entire gene (Genscript, NJ). All synthetic genes were designed to contain a coding sequence for an N-terminal signal peptide (to facilitate protein secretion), a 5′ Kozak sequence, and unique restriction sites at the 5′ and 3′ ends. These genes were then directionally cloned into the mammalian expression vector pcDNA3.1 (Invitrogen, Carlsbad, CA). Examples of fusion protein constructs are listed in table 5A. Site directed mutagenesis was performed using standard molecular biology techniques and appropriate kit (GeneArt, Regensburg).

TABLE 5A
Exemplary cytokine prodrug constructs

| | SEQ ID | |
|---|---|---|
| Name | NO | Features |
| Construct | 100 | mIL2-2x(SG4)-MMPcs1-2x(G4S)-IL2Ralpha-6His |
| A | | |
| Construct | 101 | m IL2-2x(SG4)-MMPcs1-2x(G4S)-IL2Ralpha-mIgG1 Fc |
| B | | |
| Construct | 102 | mIL2(C140S)-2x(SG4)-MMPcs1-2x(G4S)-IL2Ralpha- |
| C | | mIgG1 Fc(T252M)-6xHIS |
| Construct | 104 | mIL2(C140S)-2x(SG4)-MMPcs1-2x(G4S)-soluble |
| D | | IL2Ralpha-mIgG1 Fc(T252M)-6xHIS |
| Construct | 106 | Hu IL2(C125S)-2x(SG4)-MMPcs1-2x(G4S)-IL2Ralpha-hu |
| E | | IgG1 Fc-6xHIS |
| Construct | 803 | h IL2(C125S)-2x(SG4)-MMPcs1-2x(G4S)-chimeric IL2Ra(sushi |
| F | | mouse)-hIgG1 Fc |
| Construct | 804 | hIL2(C125S)-2x(SG4)-MMPcs1-2x(G4S)-hIL2Ra(1-219)- |
| G | | GSGGGG-hu IgG1 Fc |
| Construct | 805 | hIL2(C125S)-2x(SG4)-MMPcs1-2x(G4S)-hIL2Ra(1-178)- |
| H | | GSGGGG-hu IgG1 Fc |
| Construct | 806 | hIL2(C125S)-2x(SG4)-MMPcs1-4x(G4S)-hIL2Ra(1-219)- |
| V | | GSGGGG-hu IgG1 Fc |
| Construct | 807 | hIL2(C125S)-2x(SG4)-MMPcs1-6x(G4S)-hIL2Ra(1-219)- |
| W | | GSGGGG-hu IgG1 Fc |
| Construct | 837 | h IL2(C125S)-2x(SG4)-MMPcs1-2x(G4S)-hIL2Ra(1-219; M25I)- |
| I | | hIgG1 Fc-6xHis |
| Construct | 838 | h IL2(C125S)-2x(SG4)-MMPcs1-2x(G4S)-hIL2Ra(1-219; L42V)- |
| J | | hIgG1 Fc-6xHis |
| Construct | 808 | m IL2(C140S)-2x(SG4)-MMPik-2x(G4S)-mIL2Ralpha(1- |
| X | | 215)-mu IgG1 Fc |
| Construct | 809 | m IL2(C140S)-VRIQRKKEKMKET-MMPcs1-2x(G4S)-mIL2Ra |
| Y | | (1-215)-mu IgG1 Fc |
| Construct | 810 | m IL2-2x(SG4)-MMPlk-2x(G4S)-mIL2Ralpha(1-215)-mu |
| Z | | IgG1 Fc |
| Construct | 811 | m IL2-SGG-FHRRIKA-MMPcs1-2x(G4S)-mIL2Ra(1-215)-mu |
| AA | | IgG1 Fc |
| Construct | 812 | m IL2-SGG-FHRRIKA-MMPscr-2x(G4S)-mIL2Ra(1-215)-mu |
| BB | | IgG1 Fc |
| Construct | 813 | m IL2-2x(GHHPH)-MMPcs1-2x(G4S)-mIL2Ra(1-215)-mu |
| CC | | IgG1 Fc |
| Construct | 814 | m IL2-2x(GHHPH)-MMPscr-2x(G4S)-mIL2Ra(1-215)-mu |
| DD | | IgG1 Fc |
| Construct | 815 | m IL2-SGG-GGWSHW-MMPcs1-2x(G4S)-mIL2Ra(1-215)- |
| EE | | mu IgG1 Fc |
| Construct | 816 | m IL2-SGG-GGWSHW-MMPscr-2x(G4S)-mIL2Ra(1-215)-mu |
| FF | | IgG1 Fc |
| Construct | 817 | m IL2-SGG-KLWVLPK-MMPcs1-2x(G4S)-mIL2Ra(1-215)- |
| GG | | mu IgG1 Fc |
| Construct | 818 | m IL2-SGG-KLWVLPK-MMPscr-2x(G4S)-mIL2Ra(1-215)- |
| HH | | mu IgG1 Fc |
| Construct | 819 | m IL2-LHERHLNNN-MMPcs1-2x(G4S)-mIL2Ra(1-215)-mu |
| II | | IgG1 Fc |
| Construct | 820 | m IL2-LHERHLNNN-MMPscr-2x(G4S)-mIL2Ra(1-215)-mu |
| JJ | | IgG1 Fc |
| Construct | 821 | m IL2-VRIQRKKEKMKET-MMPscr-2x(G4S)-mIL2Ra(1- |
| KK | | 215)-mu IgG1 Fc |
| Construct | 822 | m IL2-2x(SG4)-MMPcs1-FHRRIKAGGS-mIL2Ralpha(1- |
| LL | | 215)-mu IgG1 Fc |
| Construct | 823 | m IL2-2x(SG4)-MMPscr-FHRRIKAGGS-mIL2Ralpha(1- |
| MM | | 215)-mu IgG1 Fc |
| Construct | 824 | m IL2-2x(SG4)-MMPcs1-2x(GHHPH)-mIL2Ra(1-215)-mu |
| NN | | IgG1 Fc |
| Construct | 825 | m IL2-2x(SG4)-MMPscr-2x(GHHPH)-mIL2Ra(1-215)-mu IgG1 |
| OO | | Fc |
| Construct | 826 | m IL2-2x(SG4)-MMPcs1-GGWSHWGGS-mIL2Ralpha(1- |
| PP | | 215)-mu IgG1 Fc |
| Construct | 827 | m IL2-2x(SG4)-MMPscr-GGWSHWGGS-mIL2Ralpha(1- |
| QQ | | 215)-mu IgG1 Fc |
| Construct | 828 | m IL2-2x(SG4)-MMPcs1-KLWVLPKGGS-mIL2Ralpha(1- |
| RR | | 215)-mu IgG1 Fc |
| Construct | 829 | m IL2-2x(SG4)-MMPscr-KLWVLPKGGS-mIL2Ralpha(1- |
| SS | | 215)-mu IgG1 Fc |
| Construct | 830 | m IL2-2x(SG4)-MMPcs1-LHERHLNNNG-mIL2Ralpha(1- |
| TT | | 215)-mu IgG1 Fc |
| Construct | 831 | m IL2-2x(SG4)-MMPscr-LHERHLNNNG-mIL2Ralpha(1- |
| UU | | 215)-mu IgG1 Fc |
| Construct | 832 | m IL2-SGGGGGHHPH-MMPcs1-2x(G4S)-mIL2Ra-mu IgG1 |
| VV | | Fc |
| Construct | 833 | m IL2-GHHPHSGGGG-MMPcs1-2x(G4S)-mIL2Ra-mu IgG1 |
| WW | | Fc |
| Construct | 834 | m IL2-2x(SG4)-MMPcs1-GHHPHGGGGS-mIL2Ra-mu IgG1 Fc |
| XX | | |
| Construct | 835 | m IL2-2x(SG4)-MMPcs1-2x(G4S)-mIL2Ra-mu IgG1 Fc- |
| YY | | 2x(GHHPH) |
| Construct | 836 | m IL2-2x(SG4)-MMPcs1-2x(G4S)-mIL2Ra-mu IgG1 Fc- |
| ZZ | | (GHHPH) |
| Construct | 840 | h IL2(C125S)-2x(SG4)-MMPcs1-2x(G4S)-hIL2Ra(1-219; |
| L | | SGSL39-42ELV)-hIgG1 Fc-6xHis |
| Construct | 839 | h IL2(C125S)-2x(SG4)-MMPcs1-2x(G4S)-hIL2Ra(1-219; DD4- |
| K | | 5LY)-hIgG1 Fc-6xHis |
| Construct | 841 | hIL2(C125S)-2x(SG4)-MMPcs1-2x(G4S)-hIL2Ra(1-192)-hu |
| M | | IgG1 Fc-6xHis |
| Construct | 842 | hIL2(C125S)-2x(SG4)-MMPcs1-2x(G4S)-hIL2Ra(1-192)- |
| N | | GSGGGG-hu IgG1 Fc-6xHis |
| Construct | 843 | hIL2(C125S)-2x(SG4)-MMPcs1-2x(G4S)-hIL2Ra(1-192/M25I)- |
| O | | GSGGGG-hu IgG1 Fc-6xHis |
| Construct | 844 | hIL2(C125S)-2x(SG4)-MMPcs1-2x(G4S)-hIL2Ra(1-192/L42V)- |
| P | | GSGGGG-hu IgG1 Fc-6xHis |
| Construct | 845 | hIL2(C125S)-2x(SG4)-MMPcs1-2x(G4S)-hIL2Ra(1-192/D4L, |
| Q | | D5Y)-GSGGGG-hu IgG1 Fc-6xHis |
| Construct | 846 | h IL2(C125S)-2x(SG4)-MMPcs1-2x(G4S)-hIL2Ra(M25I)- |
| AAA | | GSGGGG-hu IgG1 Fc (LALA) |
| Construct | 847 | h IL2(C125S)-2x(SG4)-MMPscr-2x(G4S)-hIL2Ra(M25I)- |
| BBB | | GSGGGG-hu IgG1 Fc (LALA) |
| Construct | 848 | h IL2(C125S)-2x(GHHPH)-MMPscr-2x(G4S)-hIL2Ra(M25I)- |
| CCC | | GSGGGG-hu IgG1 Fc (LALA) |
| Construct | 849 | h IL2(C125S)-2x(GHHPH)-MMPcs1-2x(G4S)-hIL2Ra(M25I)- |
| DDD | | GSGGGG-hu IgG1 Fc (LALA) |
| Construct | 850 | h IL2(C125S)-VRIQRKKEKMKET-MMPcs1-2x(G4S)- |
| EEE | | hIL2Ra(M25I)-GSGGGG-hu IgG1 Fc(LALA) |
| Construct | 851 | h IL2(C125S)-VRIQRKKEKMKET-MMPscr-2x(G4S)- |
| FFF | | hIL2Ra(M25I)-GSGGGG-hu IgG1 Fc(LALA) |
| Construct | 852 | m IL2(C140S)-2x(SG4)-MMPscr-2x(G4S)-mIL2Ralpha(1- |
| GGG | | 215)-mIgG1 Fc |

### Example 2: Expression and Purification of Fusion Proteins

[0274] Transient Expression of Fusion Proteins

[0275] Different mammalian cell expression systems were used to produce fusion proteins (ExpiCHO-S™, Expi293F™ and Freestyle CHO-S™, Life Technologies). Briefly, expression constructs were transiently transfected into cells following manufacturer's protocol and using reagents provided in respective expression kits. Fusion proteins were then expressed and secreted into the cell culture supernatant. Samples were collected from the production cultures every day and cell density and viability were assessed. Protein expression titers and product integrity in cell culture supernatants were analyzed by SDS-PAGE to determine the optimal harvesting time. Cell culture supernatants were generally harvested between 4 and 12 days at culture viabilities of typically >75%. On day of harvest, cell culture supernatants were cleared by centrifugation and vacuum filtration before further use.

[0276] Purification of Fusion Proteins

[0277] Fusion proteins were purified from cell culture supernatants in either a one-step or two-step procedure. Briefly, Fc domain containing proteins were purified by Protein A affinity chromatography (HiTrap MabSelect SuRe, GE Healthcare). His-tagged proteins were first purified on a Nickel-agarose column (Ni-NTA Agarose, Qiagen), followed by anion ion exchange chromatography (HiTrap Capto Q ImpRes, Sigma). All purified samples were buffer-exchanged and concentrated by ultrafiltration to a typical concentration of >1 mg/mL. Purity and homogeneity (typically >90%) of final samples were assessed by SDS PAGE under reducing and non-reducing conditions, followed by immunoblotting using an anti-His or anti-Fc antibody. Purified proteins were aliquoted and stored at −80° C. until further use. FIG. 1 shows examples of successfully purified fusion proteins.

### Example 3: Cleavage of Fusion Protein by MMP Proteases

[0278] Recombinant MMP9 and/or MMP2 (R&D Systems) was first activated with p-aminophenylmercuric acetate and this activated protease or equivalent amount of activating solution without the protease was used to digest or mock digest the fusion protein for 1 hr, 2 hr, 4 hr and overnight (18-22 hr) at 37 C. Cleavage assays are set up in TCNB buffer: 50 mM Tris, 10 mM CaCl2), 150 mM NaCl, 0.05% Brij-35 (w/v), pH 7.5. Digested protein was aliquoted and stored at −80° C. prior to testing. Aliquots of digests were subsequently analyzed by SDS-PAGE followed by Western blotting to evaluate the extent of cleavage. Digests were also assessed in functional assays such as CTLL-2 proliferation and HEK-Blue Interleukin reporter assays. As shown in FIGS. 2A-E, essentially complete cleavage by MMP9 protease of the fusion proteins with functional site is seen after overnight incubation. In contrast, proteins containing a scrambled MMP cleavage site are not cut (FIG. 2E).

### Example 4: Detection of Mouse IL-2/IL-2Rα Fusion Proteins and Mouse IL-2 by ELISA

[0279] We developed an ELISA assay to detect and quantify fusion proteins comprising IL-2 and IL-2Rα moieties. Wells of a 96-well plate are coated overnight with 100 uL of a rat anti-mouse IL-2 monoclonal antibody (JES6-1A12; ThermoFisher) at 1 mg/ml in PBS. After washing, wells are blocked with TBS/0.05% Tween 20/1% BSA, then fusion proteins and/or unknown biological samples are added for 1 hr at room temperature. After washing, an anti-mouse IL-2Rα biotin-labelled detection antibody (BAF2438, R&D systems) is added and binding is detected using Ultra Strepavidin HRP (ThermoFisher). The ELISA plate was developed by adding the chromogenic tetramethylbenzidine substrate (Ultra TMB, ThermoFisher). The reaction is stopped by addition of 0.5M H2SO4 and the absorbance is read at 450-650 nm.

[0280] We developed a second ELISA assay to detect and quantify mouse IL-2 and/or fusion proteins comprising an IL-2 moiety. Wells of a 96-well plate are coated overnight with 100 uL of a rat anti-mouse IL-2 monoclonal antibody (JES6-1A12; ThermoFisher) at 1 mg/ml in PBS. After washing, wells are blocked with TBS/0.05% Tween 20/1% BSA, then fusion proteins and/or unknown biological samples are added for 1 hr at room temperature. After washing, an anti-mouse IL-2 biotin-labelled detection antibody (JES6-5H4, ThermoFisher) is added and binding is detected using Ultra Strepavidin HRP (ThermoFisher). The ELISA plate was developed by adding the chromogenic tetramethylbenzidine substrate (Ultra TMB, ThermoFisher). The reaction is stopped by addition of 0.5M H2SO4 and the absorbance is read at 450-650 nm. This assay is able to simultaneously detect both free mouse IL-2 as well as mouse IL-2 in the context of pro-drug fusion proteins.

### Example 5: IL-2, IL-2Ra,6xHistidine and Fc Immunoblot Analyses

[0281] Untreated and digested fusion proteins were evaluated for cleavage products by Western blot. The following monoclonal antibodies were used: rat anti-mouse IL-2 antibody (JES6-1A12; ThermoFisher), goat anti-mouse IL-2 polyclonal antibody (AF-402-NA; R&D systems), mouse anti-6xHis monoclonal antibody (MA1-21315, ThermoFisher), Anti-mIgG Fc HRP conjugated (ThermoFisher cat #A16084), and Anti-human IL2 antibody (Invitrogen, cat #MA5-17097, mouse IgG1). Detection was performed using either a goat anti-rat HRP-conjugated antibody, Donkey Anti-goat HRP-conjugated antibody or Goat Anti-mouse HIRP conjugated (Jackson Immuno Research, West Grove, PA) and developed using the SuperSignal West Femto Maximum sensitivity detection reagent (ThermoFisher) following the manufacturer's recommendations.

### Example 6: IL-2 Functional Cell-Based Assays

[0282] IL-2 activity was measured using either CTLL-2 cells (ATCC) or the reporter cell line HEK Blue IL2 (Invivogen, San Diego). In brief, for the CTLL-2 assay a titration of untreated and digested samples is added to 40 000 CTLL-2 cells per well in 100 ul medium in a 96-well plate and incubated at 37C in 5% CO2 for 18-22 hr. At the end of this period, 50ug/well Thiazolyl Blue Tetrazolium Bromide (MTT) (Sigma-Aldrich) was added and the plate was incubated for 5 hr at 37C in 5% CO2. Cells were lysed with 100 u1/well 10% SDS (Sigma) acidified with HCl, incubated at 37C for 4 hr, and absorbance was read at 570 nm. Recombinant human or mouse IL-2 (Peprotech and R&D systems respectively) was used as a positive control. FIGS. 3A-B, 3K-L and 3N-P show examples of untreated and digested fusion proteins evaluated in CTLL-2 proliferation assay.

[0283] HEK-Blue™ IL-2 cells are specifically designed to monitor the activation of the JAK-STAT pathway induced by IL-2. Indeed, stimulation with human or murine IL-2 triggers the JAK/STAT5 pathway and induces secreted embryonic alkaline phosphatase (SEAP) production. SEAP can be readily monitored when using QUANTI-Blue™, a SEAP detection medium. These cells respond to human and murine IL-2. For the HEK Blue assay, untreated and digested samples are titrated and added to 50 000 HEK Blue cells per well in 200 ul medium in a 96-well plate and incubated at 37C in 5% CO2 for 20-24 hr. The following day, levels of SEAP are measured by adding 20 uL of cell supernatant to QuantiBlue reagent, followed by 1-3 h incubation at 37C and reading absorbance at 630 nm. FIGS. 3C-J, 3Q-Y and Table 5B-5C show results obtained from IL2 fusion proteins tested in HEK Blue IL2 assay.

TABLE 5B

| | +MMP | −MMP | FOLD DIFFERENCE |
|---|---|---|---|
| | EC50 | EC50 | EC50 |
| CANDIDATE | (nM) | (nM) | (HEK BLUE IL2) |
| Construct E | 0.0073 | 0.103 | 14 |
| Construct L | 0.0061 | 0.0453 | 7.3 |
| Construct K | 0.0055 | 0.0933 | 17 |
| Construct J | 0.0059 | 0.1264 | 21 |
| Construct F | 0.0078 | 0.1736 | 22 |
| Construct I | 0.0074 | 0.3165 | 43 |

TABLE 5C

| | +MMP EC50 | −MMP EC50 |
|---|---|---|
| CANDIDATE | (nM) | (nM) |
| Construct AA | 0.01088 | 0.4423 |
| Construct Y | 0.0109 | 1.232 |
| Construct CC | 0.013 | 0.66 |
| Construct EE | 0.0066 | 1.18 |
| Construct GG | 0.0072 | 0.14 |
| Construct II | 0.009 | 0.489 |
| Construct AAA | 0.0089 | 0.23 |
| Construct DDD | 0.0094 | 0.181 |
| Construct EEE | 0.0069 | 0.149 |

[0284] Aggregation, stability, and homogeneity of Construct E, Construct M, and Construct N were compared using Coomassie-stained SDS-PAGE analysis (FIG. 3M). Construct M and Construct N showed decreased aggregation and greater stability and homogeneity, consistent with there being an improvement resulting from deletion of O-glycosylation sites.

### Example 7: In Vitro Serum Stability of Fusion Protein

[0285] Construct B was incubated at 37C for up to 72 h with serum collected from 8 weeks old female C57BL/6 naive and MC38 tumor bearing mice respectively (n=2 per serum type, tumor volume >3000 mm3 at time of collection), in order to examine both non-specific cleavage as well as MMP-specific off-target cleavage. Samples were collected at 0 h, 4 h, 8 h, 24 h, 48 h and 72 h and the intact non-MMP cleaved fusion protein was quantified using an in-house developed sandwich ELISA. Results (see FIG. 4) show that the levels of fusion protein are stable in both serum types, indicating 1) a lack of off-target protein cleavage up to 72 hrs and 2) no active MMPs in circulation.

### Example 8: Pharmacokinetic Evaluation of Fusion Protein in Non-Tumor Bearing Mice

[0286] For this study, C57BL/6 8-10 weeks old female mice (Jackson Labs) were assigned to different groups (3 mice per treatment group). Mice received a single dose of fusion protein via IV injection (3.5 mg/kg). 3 mice/group/time point were bled at the following time points: pre-dose (0 h), 10 min, 30 min, 1 h, 4 h, 12 h, 24 h, 48 h, 72 h, 96 h and 120 h post dose. Blood samples were collected in Eppendorf tubes and processed to serum, then stored at −80C until testing. Samples were then evaluated by ELISA to quantify intact fusion protein levels. Mean serum concentrations of fusion protein were plotted over time and PK parameters were calculated using WinNonlin 7.0 (non-compartmental model) as shown in FIG. 5.

### Example 9: In Vivo Efficacy of Fusion Proteins in Syngeneic MC38 Colorectal Cancer Model

[0287] a. Intra-Tumoral Injection of Construct A

[0288] Pilot PK data indicates that Construct A is rapidly cleared from circulation (˜30-fold drop in serum levels within 30 min of IV injection). This is common for small therapeutic proteins whose molecular weight is below the renal glomerular filtration cut-off of ˜ 60-70 kDa. Hence, we reasoned this fusion protein was not amenable to systemic IV dosing for our POC in vivo efficacy study. Instead, we chose a direct intra-tumoral delivery design with 3 arms: vehicle, recombinant human IL-2 (r hIL2) and Construct A (n=3 mice/arm). IL-2 has previously demonstrated anti-tumor activity in a variety of syngeneic models by direct tumor injection, and based on this data, we selected to dose r hIL2 at 5 ug/day (equivalent to 50 000 U/day. Construct A was dosed at 70ug/day, which represents a 5 molar excess compared to recombinant IL-2 to compensate for the EC50 difference observed in the CTLL-2 assay. All agents and vehicle were injected daily into subcutaneous MC38 tumor mass (˜200 mm3 in size upon initiation of dosing) growing on the flank of C57BL/6 mice for 12 days with 2-day holiday after first 5 injections (total of 10 injections). Tumors and body weights were measured twice a week for the duration of the study. Tumor volumes were calculated using the following equation: (longest diameter*shortest diameter²)/2. As shown in FIG. 6A, remarkable anti-tumor activity was observed for Construct A. Indeed, a complete elimination of tumor was observed in Construct A treatment group while no tumor regression was observed in either vehicle or r hIL2 treatment groups. When ‘cured’ Construct A-treated mice were re-inoculated with MC38 tumor cells (10⁶ cells on opposite flank) on Day 40, no tumor mass was established a month after re-challenge suggesting the existence of a ‘memory’ immune response in these mice (FIG. 6B).

[0289] b. Systemic IV Injection of Construct B

[0290] The objective of this study is to evaluate efficacy of Construct B in the MC38-bearing female C57BL/6 mice. For this study, C57BL/6 6-8 weeks old female mice (Jackson Labs) were subcutaneously inoculated with MC38 cells (10⁶ cells/animal), and when the average tumor volume reached about 80 mm³, animals were randomized into 2 groups based on tumor volumes (8 mice per treatment group). Animals were dosed according to the following study design:

| | | | | Dosing | Dose | Dose |
|---|---|---|---|---|---|---|
| | | | Dose | Frequency & | Level | Volume |
| Group | Treatment | N | Route | Duration | (mpk) | (ul) |
| 1 | Vehicle Control | 8 | IV | Q3D for 21 D | N/A | 100 |
| 2 | Construct B | 8 | IV | Q3D for 21 D | 10 | 100 |

[0291] Mice were dosed over a 21 day period then further observed for an additional week. Tumors and body weights were measured twice a week for the duration of the study. Tumor volumes were calculated using the following equation: (longest diameter*shortest diameter²)/2. FIG. 7 shows the mean tumor volume over time for both groups (FIG. 7a) and individual body weights of vehicle and treated (FIG. 7B) animals.

[0292] The results showed excellent efficacy for the treatment group, with 92% inhibition of tumor growth at Day 21, while no adverse effect was observed. Remarkably, out of 8 cases, 3 complete tumor regressions (‘cures’) occurred in the colorectal cancer syngeneic setting

### Example 10: Evaluation of Immune Cell Populations by Immunohistochemistry (ruC) in MC38 Colorectal Cancer Samples

[0293] The objective of this study is to evaluate immune targets in tumor samples by IHC. See below for details:
[0294] CD4+Foxp3 double immunofluorescence staining
[0295] CD8, CD25, CD3, CD4 and CD335 single IHC staining

[0296] Note that prior to performing IHC, H&E staining was ran for all control and Construct B treated tumors to check the tissue quality.

[0297] 7 tumor samples were selected from the systemic in vivo efficacy study and formalin-fixed paraffin embedded (FFPE) blocks were prepared following standard embedding process.

[0298] Model type: MC38

| | | Number of |
|---|---|---|
| Group | Treatment | FFPE blocks |
| 1 | Vehicle, IV, Q3D for 21 days | 4 |
| 2 | Construct B, 10 mg/kg, IV, Q3D for 21 days | 3 |

[0299] The following antibodies were used:

| Antibody | Company | Cat# | Type | Reactivity |
|---|---|---|---|---|
| CD4 | Cell | 25229 | Rabbit IgG mAb | Mouse |
| | Signaling | | | |
| FoxP3 | Cell | 12653 | Rabbit IgG mAb | Mouse |
| | Signaling | | | |
| CD8 | Cell | 98941 | Rabbit IgG mAb | Mouse |
| | Signaling | | | |
| CD25 | abcam | ab227834 | Rabbit IgG mAb | Mouse |
| CD3 | Cell | 99940 | Rabbit IgG mAb | Mouse |
| | Signaling | | | |
| CD335 | R&D | AF2225- | Goat IgG pAb | Mouse |
| | Systems | SP | | |
| Bond | Leica | DS9800 | Anti-rabbit Poly-HRP-IgG | |
| Polymer | | | (<25 μg/mL) containing 10% | |
| Refine | | | (v/v) animal serum in tris- | |
| Detection | | | buffered saline/0.09% ProClin ™ | |
| | | | 950 (ready-to-use) | |
| ImmPRESS | Vector | MP-7405 | Anti-goat Poly-HRP-IgG | |
| HRP Anti- | | | (<25 μg/mL) containing 10% | |
| Goat Ig | | | (v/v) animal serum in tris- | |
| | | | buffered saline (ready-to-use) | |
| | | | and House serum (2.5%) | |
| Rabbit | Cell | 3900 | Isotype control | |
| (DA1E) | Signaling | | | |
| mAb IgG | | | | |
| TRITC | PerkinElmer | | NEL742001KT | Fluorescent |
| TSA(Red) | | | | double |
| | | | | staining |
| FITC | PerkinElmer | | NEL741001KT | Fluorescent |
| TSA(Green) | | | | double |
| | | | | staining |

[0300] FFPE blocks were sectioned with a manual rotary microtome (4 μm thickness/section) and optimized IHC assay protocols for all the antibodies were used. All stained sections were scanned with NanoZoomer-S60 Image system with 40× magnification. High resolution picture for whole section was generated and further analyzed.

[0301] Scoring Method: All the images were analyzed with HALO™ Image Analysis platform. The whole slide image was analyzed and necrosis area was excluded. The total cells and IHC positive cells were counted. IHC score is presented as the ratio of the positive cell counts against the total cell numbers within whole section and shown in FIG. 8. Results show that there is a significant increase in tumor infiltrating immune cells post Construct B treatment.

### Example 11: In Vivo MMP Activity Evaluation in Diverse Syngeneic Tumor Models

[0302] We assessed the degree of MMP activity in the models in vivo utilizing an MMP-activatable fluorescent probe, MMPSense 680™. This probe is optically silent in its intact state and becomes highly fluorescent following MMP-mediated cleavage and is designed to be used as a real-time in vivo imaging tool (Perkin Elmer). Following a single dose IV injection of the probe to tumor-bearing mice, fluorescent images were captured over 6 days and the fluorescence intensity in tumor area, which is directly proportional to MMP activity present, was quantified (FIG. 9). All models showed intrinsically different levels of MMP activity.

### Example 12: In Vivo Efficacy of Construct B in Diverse Syngeneic Tumor Models

[0303] For the efficacy studies, C57BL/6 or BALB/c mice were subcutaneously inoculated with malignant cells and when the average tumor volume reached on average 90 mm³, animals were randomized into 2 groups based on tumor volumes (n=10 mice per treatment group). Mice were dosed intravenously every 3 days (Q3D) at 20 mg/kg. Tumors, body weights and clinical observations were measured/collected twice a week for the duration of the study. Tumor volume is shown in FIGS. 10A-D, 11A, 12A, and 13B-C. Robust anti-tumor activity was observed in several models, notably 49% tumor growth inhibition (TGI) was observed at D12 in the B16F10 melanoma model and 58% tumor TGI at Day 10 in the aggressive Ras/Myc transformed RM-1 prostate cancer model (FIG. 10C-D and Table 6). Notably, no signs of toxicity, including body weight loss and elevated levels of liver and/or kidney enzymes, were noted and clinical observations were normal in these models. Liver and kidney enzyme results corresponding to FIGS. 11A and 12A are shown in FIGS. 11B-D and 12B-D, respectively.

TABLE 6

| | | | | Max | | |
|---|---|---|---|---|---|---|
| Cancer | | | Dosing | TGI | | MMP |
| type | strain | Model | Regimen | % | T test | score |
| Breast | BALB/c | EMT06 | 20 mpk, | 43 | P = | HIGH |
| | | | IV Q3D | (D20) | 0.0006 | |
| Melanoma | C57BL/6 | B16F10 | 20 mpk, | 49 | P = | LOW |
| | | | IV Q3D | (D12) | 0.0004 | |
| colorectal | BALB/c | CT-26 | 20 mpk, | 46 | P = | MED/ |
| | | | IV Q3D | (D13) | 0.0114 | HIGH |
| colorectal | C57BL/6 | MC-38 | 10 mpk, | 92 | P < | MED |
| | | | IV Q3D | (D21) | 0.0001 | |
| prostate | C57BL/6 | RM_1 | 20 mpk, | 58 | P < | NOT |
| | | | IV Q3D | (D10) | 0.0001 | DETER- |
| | | | | | | MINED |

P values represent unpaired t test (graphpad prism) between vehicle and Construct B groups on Day of max TGI.

[0304] The difference in efficacy between MC38 and B16F10 models may in part be due to the lower MMP activity measured in B16F10 tumors, resulting in less functional IL-2 being released in the TME relative to the MC38 setting (FIG. 13A).

### Example 13: Next Generation Retention Linker Peptide Binding Assay

[0305] A series of peptides comprising an MMP cleavable site with or without the addition of a tumor retention sequence were synthesized and conjugated to the fluorophore EDANS (5-((2-Aminoethyl)amino)naphthalene-1-sulfonic acid) (custom synthesis, ThermoFisher). Table 7 shows the list of peptides. These peptides were then tested for their ability to bind ECM proteins such as heparin, fibronectin and collagen which are found in abundance in the tumor stroma.

TABLE 7

| SEQ | | |
|---|---|---|
| ID | | Target of |
| NO | Sequence | retention motif |
| 901 | GGGSGGGGPLGVRG-* | None (1^{st} gen) |
| 902 | GG [symbol] GPLGVRG-* | pH dependent heparin |
| 903 | G [symbol] -* | heparin |
| 904 | [symbol] GPLGVRG-* | heparin |
| 907 | GGGSGGGPAALIGG-* | None (1^{st} gen) |
| 913 | G [symbol] GPLGVRG-* | pH dependent fibronectin |
| 914 | [symbol] GPLGVRG-* | Collagen IV |
| 915 | GGGSG [symbol] | Collagen I |

Underlining indicates MMP cleavage site. Bold italics indicates retention motif when present.
-*represents Edans fluorophore conjugated to peptide.

[0306] All binding assays were set up in 10 mM TrisHCl pH 7.5 and/or 10 mM TrisHCl pH 6. Peptides (20 uM) were incubated on a shaker for 2 hrs at room temperature with agarose cross-linked to heparin or control agarose beads (Sigma and Pierce respectively). The beads were then washed 4 times and resuspended in 100 uL of binding buffer in a black 96-well plate. Peptide binding was quantified by measuring the fluorescence of samples using excitation/emission spectra of EDANS (Ex 340/Em 490). FIG. 14A shows that several next generation MMP linker peptides containing heparin binding motifs bind to the heparin-agarose beads while 1^{st} generation MMP linkers lacking these retention sequences do not. One such peptide displays enhanced binding to heparin at pH6 (the pH of tumors) vs pH 7.5 (pH of normal tissues) (FIG. 14B).

[0307] For fibronectin and collagen binding assays, streptavidin coupled magnetic beads (Mag Sepharose, Cytiva and Dynabeads, ThermoFisher, respectively) were first incubated with biotin-labelled fibronectin (Cytoskeleton) or biotin-labelled collagen IV (Prospec) for 1 Hr with gentle shaking. Following multiple washes, the ECM-coated beads were then incubated with Edans Peptides (20 uM) for 2 hours at room temperature with shaking in neutral or acidic binding buffer. Beads were then washed and resuspended in 100 uL of binding buffer in a black 96-well plate. Peptide binding was quantified by measuring the fluorescence of samples using excitation/emission spectra of EDANS (Ex 340/Em 490). FIG. 14D shows that peptide 13 is able to bind fibronectin and displays enhanced binding at pH6 (the pH of tumors) vs pH 7.5 (pH of normal tissues). FIG. 14F shows that peptide 14 strongly binds collagen IV while peptide 15 binds to a lesser extent.

### Example 14: Next Generation Tumor Retention IL-2 Fusion Protein Binding Assays

[0308] A series of IL-2 fusion proteins comprising tumor retention sequences in the linker regions were designed and successfully manufactured (Table 3 and FIGS. 1C-D). These proteins were then tested for their ability to bind ECM proteins such as heparin, fibronectin and collagen which are found in abundance in the tumor stroma.

[0309] 96-well plates were coated with 25 ug/mL of Heparin-BSA conjugate (provided by Dr. Mueller, Boerhinger Ingelheim) or control BSA for 18-22 h at room temperature on shaker (350 rpm). After washing, wells are blocked with PBS-0.05% Tween 20/1% BSA for 90 min, then fusion proteins are titrated in 1% BSA/PBS-0.05% Tween 20 pH 7.5 and/or pH 6 and added for 2 hr at room temperature with shaking. After washing, an anti-mouse IL-2 biotin-labelled detection antibody (JES6-5H4, ThermoFisher) is added and binding is detected using Ultra Strepavidin HIRP (ThermoFisher). The plate was developed by adding the chromogenic tetramethylbenzidine substrate (Ultra TMB, ThermoFisher). The reaction is stopped by addition of 0.5M H2SO4 and the absorbance is read at 450-650 nm. IL-2 fusion variants Construct Y and Construct CC at acidic pH bind heparin in dose-dependent manner and with higher affinity than Construct B (FIG. 14C). Strikingly, Construct CC preferentially binds heparin at acidic pH and shows the most robust binding with EC50 10 nM, while Construct B's binding is much weaker with >100-fold higher EC50 value.

[0310] A similar plate-based assay was developed to interrogate binding of IL-2 fusion variants to fibronectin. 96-well plates were coated with 4 ug/mL of fibronectin (Sigma) or control BSA for 18-22 h at room temperature on shaker (350 rpm). After washing, wells are blocked with protein-free blocking buffer (Pierce) for 90 min, then fusion proteins are titrated in blocking buffer-0.1% Tween 20 pH 7.5 and/or pH 6 and added for 1 hr at room temperature with shaking. After washing, an anti-mouse IL-2 biotin-labelled detection antibody (JES6-5H4, ThermoFisher) is added and binding is detected using Ultra Streptavidin HRP (ThermoFisher). The plate was developed by adding the chromogenic tetramethylbenzidine substrate (Ultra TMB, ThermoFisher). The reaction is stopped by addition of 0.5M H2SO4 and the absorbance is read at 450-650 nm. Construct EE preferentially binds fibronectin at acidic pH and shows dose-dependent binding, while no binding is observed at pH 7.5 (FIG. 14E). No significant binding of Construct B is seen in either neutral or acidic conditions.

[0311] To test binding to collagen, a pulldown assay using agarose cross-linked to collagen (Sigma) was performed. IL-2 fusion proteins were incubated with collagen-agarose or control agarose beads for 18-22 h at 4C with gentle rotation in 1% BSA/PBS-0.05% Tween 20. After washing, proteins bound to the beads were eluted by resuspending beads in SDS sample buffer (Life Technologies). Bound proteins were then separated by SDS-PAGE on 4-12% BisTris gradient gel followed by immunoblotting with goat anti-mouse IL-2 polyclonal antibody (AF-402-NA; R&D systems). Donkey Anti-goat RP-conjugated antibody was used for detection (Jackson Immuno Research, West Grove, PA) and the blot was developed using the SuperSignal West Femto Maximum sensitivity detection reagent (ThermoFisher) following the manufacturer's recommendations. The blot image is shown in FIG. 14G. Construct GG and Construct II were specifically bound by collagen-agarose beads, while no IL-2 fusion protein bound the control agarose beads. Quantitation of the blot using iBright imaging system (Invitrogen), shows that although the fraction of bound Construct GG and Construct II was low (<1% of input), it was 2.5 and 1.4-fold higher than the fraction of bound Construct B (Table 8).

TABLE 8

| | Input | | Bound | |
|---|---|---|---|---|
| | (2%) | Bound | (% input) | Normalized |
| Construct | 16707 | 2306 | 0.3% | 1 |
| B | | | | |
| Construct | 15267 | 5191 | 0.7% | 2.5 |
| GG | | | | |
| Construct | 12094 | 2277 | 0.4% | 1.4 |
| II | | | | |

### Example 15: Next Generation Retention Linker IL-2 Fusion Proteins Show Greater Retention in Tumor In Vivo

[0312] We assessed the levels of IL-2 fusion proteins present in tumors in vivo by utilizing fluorescently labelled proteins and real-time whole-body imaging. Non-cleavable Construct GGG and Construct DD were conjugated to Dylight 650 probe according to the manufacturer's protocol (Dylight 650 Antibody labeling kit, ThermoFisher). We confirmed the conjugation did not significantly alter the proteins' binding to heparin. BALB/c mice were subcutaneously inoculated with EMT6 breast cancer syngeneic model and when the average tumor volume reached 240 mm³, animals were randomized into 3 groups based on tumor volumes (n=2 mice per treatment group). Table below shows study design:

| | | | | Dosing | Dose | Dose |
|---|---|---|---|---|---|---|
| | | | Dose | Frequency | Level | Volume |
| Group | Treatment | N | Route | & Duration | (mg/kg) | (mL/kg) |
| 1 | Control-PBS | 2 | IV | Once | NA | 4 |
| 2 | Construct | 2 | IV | Once | 8 | 4 |
| | GGG-DY650 | | | | | |
| 3 | Construct | 2 | IV | Once | 8 | 4 |
| | DD-DY650 | | | | | |

[0313] Following a single dose of the labeled IL-2 fusion proteins to tumor-bearing mice, fluorescent images (excitation 640/emission 680 consistent with Dylight 650 probe ex/em spectra) were captured over 96 hrs on an IVIS system (PerkinElmer, IVIS Lumina Series III) and are shown in FIG. 15A. The fluorescence intensity in tumor area was quantified across the groups, average background tumor fluorescence (group 1) was subtracted from group 2 and 3 values at each time-point, and data was normalized to the initial fluorescence intensity of same amount of each labeled protein. FIG. 15B shows that the tumor-associated fluorescence with group 3 is roughly 2-fold higher than that of group 2 at each of the time-points tested. This signifies next generation retention linker Construct DD accumulates and is retained in tumors at 2-fold higher levels compared to 1^{st} generation IL-2 fusion protein Construct GGG.

### Example 16: Next Generation Retention MMP-Linker Leads to Increased Levels of Drug and IL2 in Tumors and Serum In Vivo

[0314] We quantified levels of full-length IL2-IL2Ra fusion proteins and IL-2 in tumor samples collected during pre-clinical efficacy studies comparing Construct B and retention linker IL-2 fusion drugs (see example 17).

[0315] Tumors (n=3 per group) were collected 24 h after the last dose injection, flash frozen and stored at −80C until further processing. Tumor lysates were generated using tissue extraction reagent (ThermoFisher) supplemented with protease and phosphatase inhibitors and standard techniques and protein concentrations were determined using the BCA assay (Pierce).

[0316] Lysates were tested with in-house ELISAs to measure full-length IL-2 fusion proteins (IL-2 capture/IL-2Rα detection) and IL-2 fusion proteins+free IL-2 (IL-2 capture/IL-2 detection). Free IL-2 levels in tumor were calculated by subtracting drug levels from the drug+IL-2 data set. Results were normalized to 1 mg of tumor lysate and mean values are shown in FIG. 15C-H. Levels of Construct CC (20 mg/kg dose) in tumor are roughly 3-fold higher compared to Construct B levels, despite Construct B being dosed at 40 mg/kg (FIG. C). Drug level comparison in samples from the 10 mg/kg dosing cohort shows highest levels present in collagen binding Construct GG treated tumors (FIG. 15F). This indicates that retention linker technology may lead to a robust increase in drug amounts in tumor in vivo. Likewise, IL-2 levels in Construct CC, Construct GG and Construct II treated tumors are elevated compared to Construct B treated tumors (FIG. 15E/H). This implies that next generation retention linker technology is able to retain in TME both full-length drug and released IL-2 post-cleavage.

[0317] The equivalent serum samples (n=3 per group) were also tested with in-house ELISAs to quantify full-length IL-2 fusion drugs and results are shown in FIG. 15I-K. 24 hrs after dosing, circulating drug levels of Construct B (40 mg/kg) and Construct CC (20 mg/kg) are roughly similar despite the dosing difference, whilst in the 10 mg/kg cohort, Construct GG and Construct II drug levels in serum are roughly 5-fold and 3-fold higher than Construct B serum levels (FIG. 15J). Additional serum samples collected at Day 17 (Construct B 20 mg/kg) and Day 21 (Construct Y 20 mg/kg), 4 days and 8 days respectively after the last IV injection, were assayed for full-length IL-2 fusion drug. FIG. 15K shows that Construct Y drug levels in circulation are strikingly more than 10-fold higher than Construct B despite serum being collected 4 days later. Collectively, these data indicate retention linker technology leads to increased levels of drug in circulation.

### Example 17: In Vivo Efficacy of Retention Linker IL-2 Drugs in B16F10 Syngeneic Model

[0318] In a first efficacy study, C57BL/6 mice were subcutaneously inoculated with B16F10 melanoma cells and when the average tumor volume reached on average 70-90 mm³, animals were randomized into 5 groups based on tumor volumes (n=6 mice per treatment group). Mice were dosed intravenously every 3 days (Q3D) for a total of 5 doses according to following design:

| | | | | Dosing | Dose | Dose |
|---|---|---|---|---|---|---|
| | | | Dose | Frequency | Level | Volume |
| Group | Treatment | N | Route | & Duration | (mg/kg) | (mL/kg) |
| 1 | PBS- | 6 | IV | Q3D for 14 | NA | 4 |
| | Vehicle | | | days (5 | | |
| | | | | doses) | | |
| 2 | Construct B | 6 | IV | Q3D for 14 | 20 | 4 |
| | | | | days (5 | | |
| | | | | doses) | | |
| 3 | Construct B | 6 | IV | Q3D for 14 | 40 | 8 |
| | | | | days (5 | | |
| | | | | doses) | | |
| 4 | Construct Y | 6 | IV | Q3D for 14 | 20 | 4.45 |
| | | | | days (5 | | |
| | | | | doses) | | |
| 5 | Construct | 6 | IV | Q3D for 14 | 20 | 5 |
| | CC | | | days (5 | | |
| | | | | doses) | | |

[0319] Tumor volumes were measured twice a week for the duration of the study. Mean tumor volume is shown in FIG. 16A. Anti-tumor activity was observed in all treatment groups, however the most robust tumor growth inhibition (TGI) was observed in the retention linker drugs Construct Y and Construct CC (77 and 7800 respectively) compared to ˜60% o TGI in Construct B treated groups (regardless of dose, Table 9).

TABLE 9

| Group | Drug | Dose | TGI (%) D 13 | P value |
|---|---|---|---|---|
| 2 | Construct B | 20 mg/kg | 61.43 | 0.0002 |
| 3 | Construct B | 40 mg/kg | 58.44 | 0.0019 |
| 4 | Construct Y | 20 mg/kg | 76.59 | 0.0001 |
| 5 | Construct CC | 20 mg/kg | 77.84 | 0.0002 |

P values represent unpaired t test (graphpad prism) between vehicle and Test article groups on Day 13.

[0320] In a second efficacy study in the same model, C57BL/6 mice were subcutaneously inoculated with B16F10 melanoma cells and when the average tumor volume reached on average 70-90 mm³, animals were randomized into 5 groups based on tumor volumes (n=6 mice per treatment group). Mice were dosed intravenously every 3 days (Q3D) for a total of 5 doses according to following design:

| | | | | Dosing | Dose | Dose |
|---|---|---|---|---|---|---|
| | | | Dose | Frequency | Level | Volume |
| Group | Treatment | N | Route | & Duration | (mg/kg) | (mL/kg) |
| 1 | PBS-Vehicle | 6 | IV | Q3D for 14 | NA | 5 |
| | | | | days (5 | | |
| | | | | doses) | | |
| 2 | Construct B | 6 | IV | Q3D for 14 | 10 | 5 |
| | | | | days (5 | | |
| | | | | doses) | | |
| 3 | Construct EE | 6 | IV | Q3D for 14 | 10 | 5 |
| | | | | days (5 | | |
| | | | | doses) | | |
| 4 | Construct GG | 6 | IV | Q3D for 14 | 10 | 5 |
| | | | | days (5 | | |
| | | | | doses) | | |
| 5 | Construct II | 6 | IV | Q3D for 14 | 10 | 5 |
| | | | | days (5 | | |
| | | | | doses) | | |

[0321] Tumor volumes were measured twice a week for the duration of the study up until Day 20, 7 days following the fifth dose. On Day 20, mice received an additional dose of drug, animals were sacrificed 24 hrs later and tissues and blood (processed to serum) were collected and stored at −80C for further testing. Mean tumor volume is shown in FIG. 16B. Only modest anti-tumor activity was observed with Construct B at 10 mg/kg in this aggressive model (27% TGI Day 15, Table 10). Strikingly, at equivalent dosage all retention linker IL-2 fusion drugs showed superior TGI (Table 10). In particular, collagen binding drugs Construct GG and Construct II (10 mg/kg dosing) showed robust tumor control similar to what was previously observed for Construct B at twice higher dose (57% TGI Day 15 Table 10 compared to 61% TGI Day 13 Table 9 respectively). Furthermore, after a dosing holiday of 7 days Construct B showed diminished efficacy whilst all retention linker drugs maintained similar levels of tumor control at Day 20. Collectively, FIGS. 16A-B demonstrate that retention linker IL-2 drugs have superior anti-tumor efficacy in a pre-clinical melanoma model. This is most likely due to the higher levels of both circulating drugs in serum and resident drug in TME, which can exert prolonged anti-tumor activity even after an extended dosing holiday.

TABLE 10

| Group | Drug | Dose | TGI (%) D 15 | TGI (%) D 20 |
|---|---|---|---|---|
| 2 | Construct B | 10 mg/kg | 27.43 | 14.02 |
| 3 | Construct EE | 10 mg/kg | 39.32 | 37.61 |
| 4 | Construct GG | 10 mg/kg | 57.18 | 64.70 |
| 5 | Construct II | 10 mg/kg | 57.68 | 68.52 |

### Example 18: IFN-γ Levels in Tumor Samples

[0322] IFN-γ cytokine levels in tumor lysates (n=3 per group) were measured using a Luminex kit according to manufacturer's protocol (Invitrogen). Results were normalized to 1 mg of lysate and mean values are shown in FIG. 17A/B. Elevated levels of IFN-γ were measured in all retention linker TL-2 drug treated tumors compared to Construct B treated tumors. IFN-γ was undetectable in vehicle treated tumors.

The application's sequence listing, which the Patent Office published only in electronic form, follows.

SEQUENCE LISTING (915 sequences)

SEQ ID NO: 1 - protein, 133 aa, Homo sapiens [sequence omitted]

SEQ ID NO: 2 - protein, 133 aa, Homo sapiens
APTSSSTKKTQLQLEHLLLDLQMILNGINNYKNPKLTRMLTFKFYMPKKATELKHLQCLEEELKPLEEVLNLAQSKNFHLRPRDLISNINVIVLELKGSETTFMCEYADETATIVEFLNRWITFSQSIISTLT

SEQ ID NO: 3 - protein, 149 aa, Mus musculus
APTSSSTSSSTAEAQQQQQQQQQQQQHLEQLLMDLQELLSRMENYRNLKLPRMLTFKFYLPKQATELKDLQCLEDELGPLRHVLDLTQSKSFQLEDAENFISNIRVTVVKLKGSDNTFECQFDDESATVVDFLRRWIAFCQSIISTSPQ

SEQ ID NO: 4 - protein, 149 aa, Mus musculus
APTSSSTSSSTAEAQQQQQQQQQQQQHLEQLLMDLQELLSRMENYRNLKLPRMLTFKFYLPKQATELKDLQCLEDELGPLRHVLDLTQSKSFQLEDAENFISNIRVTVVKLKGSDNTFECQFDDESATVVDFLRRWIAFSQSIISTSPQ

SEQ ID NO: 5-9 - skipped (5 entries)

SEQ ID NO: 10 - protein, 219 aa, Homo sapiens
ELCDDDPPEIPHATFKAMAYKEGTMLNCECKRGFRRIKSGSLYMLCTGNSSHSSWDNQCQCTSSATRNTTKQVTPQPEEQKERKTTEMQSPMQPVDQASLPGHCREPPPWENEATERIYHFVVGQMVYYQCVQGYRALHRGPAESVCKMTHGKTRWTQPQLICTGEMETSQFPGEEKPQASPEGRPESETSCLVTTTDFQIQTEMAATMETSIFTTEYQ

SEQ ID NO: 11 - protein, 63 aa, Homo sapiens
ELCDDDPPEIPHATFKAMAYKEGTMLNCECKRGFRRIKSGSLYMLCTGNSSHSSWDNQCQCTS

SEQ ID NO: 12 - protein, 219 aa, Homo sapiens
ELCDDDPPEIPHATFKAMAYKEGTILNCECKRGFRRIKSGSLYMLCTGNSSHSSWDNQCQCTSSATRNTTKQVTPQPEEQKERKTTEMQSPMQPVDQASLPGHCREPPPWENEATERIYHFVVGQMVYYQCVQGYRALHRGPAESVCKMTHGKTRWTQPQLICTGEMETSQFPGEEKPQASPEGRPESETSCLVTTTDFQIQTEMAATMETSIFTTEYQ

SEQ ID NO: 13 - protein, 219 aa, Homo sapiens
ELCDDDPPEIPHATFKAMAYKEGTMLNCECKRGFRRIKSGSVYMLCTGNSSHSSWDNQCQCTSSATRNTTKQVTPQPEEQKERKTTEMQSPMQPVDQASLPGHCREPPPWENEATERIYHFVVGQMVYYQCVQGYRALHRGPAESVCKMTHGKTRWTQPQLICTGEMETSQFPGEEKPQASPEGRPESETSCLVTTTDFQIQTEMAATMETSIFTTEYQ

SEQ ID NO: 14 - protein, 219 aa, Homo sapiens
ELCDDDPPEIPHATFKAMAYKEGTILNCECKRGFRRIKSGSVYMLCTGNSSHSSWDNQCQCTSSATRNTTKQVTPQPEEQKERKTTEMQSPMQPVDQASLPGHCREPPPWENEATERIYHFVVGQMVYYQCVQGYRALHRGPAESVCKMTHGKTRWTQPQLICTGEMETSQFPGEEKPQASPEGRPESETSCLVTTTDFQIQTEMAATMETSIFTTEYQ

SEQ ID NO: 15 - protein, 240 aa, Homo sapiens
LNTTILTPNGNEDTTADFFLTTMPTDSLSVSTLPLPEVQCFVFNVEYMNCTWNSSSEPQPTNLTLHYWYKNSDNDKVQKCSHYLFSEEITSGCQLQKKEIHLYQTFVVQLQDPREPRRQATQMLKLQNLVIPWAPENLTLHKLSESQLELNWNNRFLNHCLEHLVQYRTDWDHSWTEQSVDYRHKFSLPSVDGQKRYTFRVRSRFNPLCGSAQHWSEWSHPIHWGSNTSKENPFLFALEA

SEQ ID NO: 16 - protein, 214 aa, Homo sapiens
AVNGTSQFTCFYNSRANISCVWSQDGALQDTSCQVHAWPDRRRWNQTCELLPVSQASWACNLILGAPDSQKLTTVDIVTLRVLCREGVRWRVMAIQDFKPFENLRLMAPISLQVVHVETHRCNISWEISQASHYFERHLEFEARTLSPGHTWEEAPLLTLKQKQEWICLETLTPDTQYEFQVRVKPLQGEFTTWSPWSQPLAFRTKPAALGKDT

SEQ ID NO: 17 - protein, 214 aa, Artificial Sequence
  Synthetic
ELCLYDPPEVPNATFKALSYKNGTILNCECKRGFRRLKELVYMRCLGNSWSSNCQCTSSATRNTTKQVTPQPEEQKERKTTEMQSPMQPVDQASLPGHCREPPPWENEATERIYHFVVGQMVYYQCVQGYRALHRGPAESVCKMTHGKTRWTQPQLICTGEMETSQFPGEEKPQASPEGRPESETSCLVTTTDFQIQTEMAATMETSIFTTEYQ

SEQ ID NO: 18 - protein, 215 aa, Mus musculus
ELCLYDPPEVPNATFKALSYKNGTILNCECKRGFRRLKELVYMRCLGNSWSSNCQCTSNSHDKSRKQVTAQLEHQKEQQTTTDMQKPTQSMHQENLTGHCREPPPWKHEDSKRIYHFVEGQSVHYECIPGYKALQRGPAISICKMKCGKTGWTQPQLTCVDEREHHRFLASEESQGSRNSSPESETSCPITTTDFPQPTETTAMTETFVLTMEYK

SEQ ID NO: 19 - protein, 58 aa, Mus musculus
ELCLYDPPEVPNATFKALSYKNGTILNCECKRGFRRLKELVYMRCLGNSWSSNCQCTS

SEQ ID NO: 20 - protein, 219 aa, Homo sapiens
ELCLYDPPEIPHATFKAMAYKEGTILNCECKRGFRRIKSGSLYMLCTGNSSHSSWDNQCQCTSSATRNTTKQVTPQPEEQKERKTTEMQSPMQPVDQASLPGHCREPPPWENEATERIYHFVVGQMVYYQCVQGYRALHRGPAESVCKMTHGKTRWTQPQLICTGEMETSQFPGEEKPQASPEGRPESETSCLVTTTDFQIQTEMAATMETSIFTTEYQ

SEQ ID NO: 21 - protein, 219 aa, Homo sapiens
ELCLYDPPEIPHATFKAMAYKEGTMLNCECKRGFRRIKSGSVYMLCTGNSSHSSWDNQCQCTSSATRNTTKQVTPQPEEQKERKTTEMQSPMQPVDQASLPGHCREPPPWENEATERIYHFVVGQMVYYQCVQGYRALHRGPAESVCKMTHGKTRWTQPQLICTGEMETSQFPGEEKPQASPEGRPESETSCLVTTTDFQIQTEMAATMETSIFTTEYQ

SEQ ID NO: 22 - protein, 219 aa, Homo sapiens
ELCLYDPPEIPHATFKAMAYKEGTILNCECKRGFRRIKSGSVYMLCTGNSSHSSWDNQCQCTSSATRNTTKQVTPQPEEQKERKTTEMQSPMQPVDQASLPGHCREPPPWENEATERIYHFVVGQMVYYQCVQGYRALHRGPAESVCKMTHGKTRWTQPQLICTGEMETSQFPGEEKPQASPEGRPESETSCLVTTTDFQIQTEMAATMETSIFTTEYQ

SEQ ID NO: 23 - protein, 219 aa, Homo sapiens
ELCLYDPPEIPHATFKAMAYKEGTMLNCECKRGFRRIKSGSLYMLCTGNSSHSSWDNQCQCTSSATRNTTKQVTPQPEEQKERKTTEMQSPMQPVDQASLPGHCREPPPWENEATERIYHFVVGQMVYYQCVQGYRALHRGPAESVCKMTHGKTRWTQPQLICTGEMETSQFPGEEKPQASPEGRPESETSCLVTTTDFQIQTEMAATMETSIFTTEYQ

SEQ ID NO: 24 - protein, 218 aa, Homo sapiens
ELCDDDPPEIPHATFKAMAYKEGTMLNCECKRGFRRIKELVYMLCTGNSSHSSWDNQCQCTSSATRNTTKQVTPQPEEQKERKTTEMQSPMQPVDQASLPGHCREPPPWENEATERIYHFVVGQMVYYQCVQGYRALHRGPAESVCKMTHGKTRWTQPQLICTGEMETSQFPGEEKPQASPEGRPESETSCLVTTTDFQIQTEMAATMETSIFTTEYQ

SEQ ID NO: 25 - protein, 192 aa, Homo sapiens
ELCDDDPPEIPHATFKAMAYKEGTMLNCECKRGFRRIKSGSLYMLCTGNSSHSSWDNQCQCTSSATRNTTKQVTPQPEEQKERKTTEMQSPMQPVDQASLPGHCREPPPWENEATERIYHFVVGQMVYYQCVQGYRALHRGPAESVCKMTHGKTRWTQPQLICTGEMETSQFPGEEKPQASPEGRPESETSC

SEQ ID NO: 26 - protein, 192 aa, Homo sapiens
ELCDDDPPEIPHATFKAMAYKEGTILNCECKRGFRRIKSGSLYMLCTGNSSHSSWDNQCQCTSSATRNTTKQVTPQPEEQKERKTTEMQSPMQPVDQASLPGHCREPPPWENEATERIYHFVVGQMVYYQCVQGYRALHRGPAESVCKMTHGKTRWTQPQLICTGEMETSQFPGEEKPQASPEGRPESETSC

SEQ ID NO: 27 - protein, 192 aa, Homo sapiens
ELCDDDPPEIPHATFKAMAYKEGTMLNCECKRGFRRIKSGSVYMLCTGNSSHSSWDNQCQCTSSATRNTTKQVTPQPEEQKERKTTEMQSPMQPVDQASLPGHCREPPPWENEATERIYHFVVGQMVYYQCVQGYRALHRGPAESVCKMTHGKTRWTQPQLICTGEMETSQFPGEEKPQASPEGRPESETSC

SEQ ID NO: 28 - protein, 192 aa, Homo sapiens
ELCLYDPPEIPHATFKAMAYKEGTMLNCECKRGFRRIKSGSLYMLCTGNSSHSSWDNQCQCTSSATRNTTKQVTPQPEEQKERKTTEMQSPMQPVDQASLPGHCREPPPWENEATERIYHFVVGQMVYYQCVQGYRALHRGPAESVCKMTHGKTRWTQPQLICTGEMETSQFPGEEKPQASPEGRPESETSC

SEQ ID NO: 29 - protein, 191 aa, Homo sapiens
ELCDDDPPEIPHATFKAMAYKEGTMLNCECKRGFRRIKELVYMLCTGNSSHSSWDNQCQCTSSATRNTTKQVTPQPEEQKERKTTEMQSPMQPVDQASLPGHCREPPPWENEATERIYHFVVGQMVYYQCVQGYRALHRGPAESVCKMTHGKTRWTQPQLICTGEMETSQFPGEEKPQASPEGRPESETSC

SEQ ID NO: 30 - protein, 247 aa, Homo sapiens
QSVLTQPPSVSGAPGQRVTISCTGTSSNIGAHYDVHWYQQFPGTAPKRLIYGNNNRPSGVPARFSGSKSGTSASLAITGLQAEDEADYYCQSYDRSLRGWVFGGGTKLTVLGEGKSSGSGSESKASEVQLVESGGGLVQPGRSLRLSCAASGFTFDDYAMHWVRQAPGKGLEWVSGISWNSGSIGYADSVKGRFTISRDNSKNTLYLQMNSLRAEDTAVYYCAKDVNWNYGYYFDYWGQGTLVTVSS

SEQ ID NO: 31 - protein, 251 aa, Homo sapiens
QSVLTQPPSVSGAPGQRVTISCTGTSSNIGAHYDVHWYQQFPGTAPKRLIYGNNNRPSGVPARFSGSKSGTSASLAITGLQAEDEADYYCQSYDRSLRGWVFGGGTKLTVLGGSTSGSGKPGSGEGSTKGEVQLVESGGGLVQPGRSLRLSCAASGFTFDDYAMHWVRQAPGKGLEWVSGISWNSGSIGYADSVKGRFTISRDNSKNTLYLQMNSLRAEDTAVYYCAKDVNWNYGYYFDYWGQGTLVTVSS

SEQ ID NO: 32 - protein, 112 aa, Homo sapiens
QSVLTQPPSVSGAPGQRVTISCTGTSSNIGAHYDVHWYQQFPGTAPKRLIYGNNNRPSGVPARFSGSKSGTSASLAITGLQAEDEADYYCQSYDRSLRGWVFGGGTKLTVLG

SEQ ID NO: 33 - protein, 121 aa, Homo sapiens
EVQLVESGGGLVQPGRSLRLSCAASGFTFDDYAMHWVRQAPGKGLEWVSGISWNSGSIGYADSVKGRFTISRDNSKNTLYLQMNSLRAEDTAVYYCAKDVNWNYGYYFDYWGQGTLVTVSS

SEQ ID NO: 34 - protein, 14 aa, Artificial Sequence
  Synthetic
TGTSSNIGAHYDVH

SEQ ID NO: 35 - protein, 7 aa, Artificial Sequence
  Synthetic
GNNNRPS

SEQ ID NO: 36 - protein, 11 aa, Artificial Sequence
  Synthetic
QSYDRSLRGWV

SEQ ID NO: 37 - protein, 6 aa, Artificial Sequence
  Synthetic
DDYAMH

SEQ ID NO: 38 - protein, 17 aa, Artificial Sequence
  Synthetic
GISWNSGSIGYADSVKG

SEQ ID NO: 39 - protein, 13 aa, Artificial Sequence
  Synthetic
KDVNWNYGYYFDY

SEQ ID NO: 40 - protein, 192 aa, Homo sapiens
ELCLYDPPEIPHATFKAMAYKEGTILNCECKRGFRRIKSGSLYMLCTGNSSHSSWDNQCQCTSSATRNTTKQVTPQPEEQKERKTTEMQSPMQPVDQASLPGHCREPPPWENEATERIYHFVVGQMVYYQCVQGYRALHRGPAESVCKMTHGKTRWTQPQLICTGEMETSQFPGEEKPQASPEGRPESETSC

SEQ ID NO: 41 - protein, 192 aa, Homo sapiens
ELCDDDPPEIPHATFKAMAYKEGTILNCECKRGFRRIKSGSVYMLCTGNSSHSSWDNQCQCTSSATRNTTKQVTPQPEEQKERKTTEMQSPMQPVDQASLPGHCREPPPWENEATERIYHFVVGQMVYYQCVQGYRALHRGPAESVCKMTHGKTRWTQPQLICTGEMETSQFPGEEKPQASPEGRPESETSC

SEQ ID NO: 42 - protein, 192 aa, Homo sapiens
ELCLYDPPEIPHATFKAMAYKEGTMLNCECKRGFRRIKSGSVYMLCTGNSSHSSWDNQCQCTSSATRNTTKQVTPQPEEQKERKTTEMQSPMQPVDQASLPGHCREPPPWENEATERIYHFVVGQMVYYQCVQGYRALHRGPAESVCKMTHGKTRWTQPQLICTGEMETSQFPGEEKPQASPEGRPESETSC

SEQ ID NO: 43 - protein, 192 aa, Homo sapiens
ELCLYDPPEIPHATFKAMAYKEGTILNCECKRGFRRIKSGSVYMLCTGNSSHSSWDNQCQCTSSATRNTTKQVTPQPEEQKERKTTEMQSPMQPVDQASLPGHCREPPPWENEATERIYHFVVGQMVYYQCVQGYRALHRGPAESVCKMTHGKTRWTQPQLICTGEMETSQFPGEEKPQASPEGRPESETSC

SEQ ID NO: 44 - protein, 178 aa, Homo sapiens
ELCDDDPPEIPHATFKAMAYKEGTMLNCECKRGFRRIKSGSLYMLCTGNSSHSSWDNQCQCTSSATRNTTKQVTPQPEEQKERKTTEMQSPMQPVDQASLPGHCREPPPWENEATERIYHFVVGQMVYYQCVQGYRALHRGPAESVCKMTHGKTRWTQPQLICTGEMETSQFPGEEKP

SEQ ID NO: 45 - protein, 178 aa, Homo sapiens
ELCDDDPPEIPHATFKAMAYKEGTILNCECKRGFRRIKSGSLYMLCTGNSSHSSWDNQCQCTSSATRNTTKQVTPQPEEQKERKTTEMQSPMQPVDQASLPGHCREPPPWENEATERIYHFVVGQMVYYQCVQGYRALHRGPAESVCKMTHGKTRWTQPQLICTGEMETSQFPGEEKP

SEQ ID NO: 46 - protein, 178 aa, Homo sapiens
ELCDDDPPEIPHATFKAMAYKEGTMLNCECKRGFRRIKSGSVYMLCTGNSSHSSWDNQCQCTSSATRNTTKQVTPQPEEQKERKTTEMQSPMQPVDQASLPGHCREPPPWENEATERIYHFVVGQMVYYQCVQGYRALHRGPAESVCKMTHGKTRWTQPQLICTGEMETSQFPGEEKP

SEQ ID NO: 47 - protein, 178 aa, Homo sapiens
ELCLYDPPEIPHATFKAMAYKEGTMLNCECKRGFRRIKSGSLYMLCTGNSSHSSWDNQCQCTSSATRNTTKQVTPQPEEQKERKTTEMQSPMQPVDQASLPGHCREPPPWENEATERIYHFVVGQMVYYQCVQGYRALHRGPAESVCKMTHGKTRWTQPQLICTGEMETSQFPGEEKP

SEQ ID NO: 48 - protein, 177 aa, Homo sapiens
ELCDDDPPEIPHATFKAMAYKEGTMLNCECKRGFRRIKELVYMLCTGNSSHSSWDNQCQCTSSATRNTTKQVTPQPEEQKERKTTEMQSPMQPVDQASLPGHCREPPPWENEATERIYHFVVGQMVYYQCVQGYRALHRGPAESVCKMTHGKTRWTQPQLICTGEMETSQFPGEEKP

SEQ ID NO: 49 - protein, 178 aa, Homo sapiens
ELCDDDPPEIPHATFKAMAYKEGTILNCECKRGFRRIKSGSVYMLCTGNSSHSSWDNQCQCTSSATRNTTKQVTPQPEEQKERKTTEMQSPMQPVDQASLPGHCREPPPWENEATERIYHFVVGQMVYYQCVQGYRALHRGPAESVCKMTHGKTRWTQPQLICTGEMETSQFPGEEKP

SEQ ID NO: 50 - protein, 178 aa, Homo sapiens
ELCLYDPPEIPHATFKAMAYKEGTMLNCECKRGFRRIKSGSVYMLCTGNSSHSSWDNQCQCTSSATRNTTKQVTPQPEEQKERKTTEMQSPMQPVDQASLPGHCREPPPWENEATERIYHFVVGQMVYYQCVQGYRALHRGPAESVCKMTHGKTRWTQPQLICTGEMETSQFPGEEKP

SEQ ID NO: 51 - protein, 178 aa, Homo sapiens
ELCLYDPPEIPHATFKAMAYKEGTILNCECKRGFRRIKSGSVYMLCTGNSSHSSWDNQCQCTSSATRNTTKQVTPQPEEQKERKTTEMQSPMQPVDQASLPGHCREPPPWENEATERIYHFVVGQMVYYQCVQGYRALHRGPAESVCKMTHGKTRWTQPQLICTGEMETSQFPGEEKP

SEQ ID NO: 52-69 - skipped (18 entries)

SEQ ID NO: 70 - protein, 226 aa, Homo sapiens
DKTHTCPPCPAPELLGGPSVFLFPPKPKDTLMISRTPEVTCVVVDVSHEDPEVKFNWYVDGVEVHNAKTKPREEQYNSTYRVVSVLTVLHQDWLNGKEYKCKVSNKALPAPIEKTISKAKGQPREPQVYTLPPSRDELTKNQVSLTCLVKGFYPSDIAVEWESNGQPENNYKTTPPVLDSDGSFFLYSKLTVDKSRWQQGNVFSCSVMHEALHNHYTQKSLSLSPG

SEQ ID NO: 71 - protein, 226 aa, Homo sapiens
DKTHTCPPCPAPELLGGPSVFLFPPKPKDTLMISRTPEVTCVVVDVSHEDPEVKFNWYVDGVEVHNAKTKPREEQYNSTYRVVSVLTVLHQDWLNGKEYKCKVSNKALPAPIEKTISKAKGQPREPQVYTLPPSRDELTKNQVSLTCLVKGFYPSDIAVEWESNGQPENNYDTTPPVLDSDGSFFLYSDLTVDKSRWQQGNVFSCSVMHEALHNHYTQKSLSLSPG

SEQ ID NO: 72 - protein, 591 aa, Homo sapiens
RGVFRRDAHKSEVAHRFKDLGEENFKALVLIAFAQYLQQCPFEDHVKLVNEVTEFAKTCVADESAENCDKSLHTLFGDKLCTVATLRETYGEMADCCAKQEPERNECFLQHKDDNPNLPRLVRPEVDVMCTAFHDNEETFLKKYLYEIARRHPYFYAPELLFFAKRYKAAFTECCQAADKAACLLPKLDELRDEGKASSAKQRLKCASLQKFGERAFKAWAVARLSQRFPKAEFAEVSKLVTDLTKVHTECCHGDLLECADDRADLAKYICENQDSISSKLKECCEKPLLEKSHCIAEVENDEMPADLPSLAADFVESKDVCKNYAEAKDVFLGMFLYEYARRHPDYSVVLLLRLAKTYETTLEKCCAAADPHECYAKVFDEFKPLVEEPQNLIKQNCELFEQLGEYKFQNALLVRYTKKVPQVSTPTLVEVSRNLGKVGSKCCKHPEAKRMPCAEDYLSVVLNQLCVLHEKTPVSDRVTKCCTESLVNRRPCFSALEVDETYVPKEFNAETFTFHADICTLSEKERQIKKQTALVELVKHKPKATKEQLKAVMDDFAAFVEKCCKADDKETCFAEEGKKLVAASQAALGL

SEQ ID NO: 73 - protein, 222 aa, Mus musculus
GCKPCICTVPEVSSVFIFPPKPKDVLTITLTPKVTCVVVDISKDDPEVQFSWFVDDVEVHTAQTQPREEQFNSTFRSVSELPIMHQDWLNGKEFKCRVNSAAFPAPIEKTISKTKGRPKAPQVYTIPPPKEQMAKDKVSLTCMITDFFPEDITVEWQWNGQPAENYKNTQPIMDTDGSYFVYSKLNVQKSNWEAGNTFTCSVLHEGLHNHHTEKSLSHSPGK

SEQ ID NO: 74 - protein, 221 aa, Mus musculus
GCKPCICTVPEVSSVFIFPPKPKDVLMITLTPKVTCVVVDISKDDPEVQFSWFVDDVEVHTAQTQPREEQFNSTFRSVSELPIMHQDWLNGKEFKCRVNSAAFPAPIEKTISKTKGRPKAPQVYTIPPPKEQMAKDKVSLTCMITDFFPEDITVEWQWNGQPAENYKNTQPIMDTDGSYFVYSKLNVQKSNWEAGNTFTCSVLHEGLHNHHTEKSLSHSPG

SEQ ID NO: 75-79 - skipped (5 entries)

SEQ ID NO: 80 - protein, 7 aa, Artificial Sequence
  Synthetic
GPLGVRG

SEQ ID NO: 81 - protein, 7 aa, Artificial Sequence
  Synthetic
GPLGVRG

SEQ ID NO: 82 - protein, 7 aa, Artificial Sequence
  Synthetic
GPLGLRG

SEQ ID NO: 83 - protein, 7 aa, Artificial Sequence
  Synthetic
GPLGLAR

SEQ ID NO: 84 - protein, 8 aa, Artificial Sequence
  Synthetic
GPAALVGA

SEQ ID NO: 85 - protein, 8 aa, Artificial Sequence
  Synthetic
GPAALIGG

SEQ ID NO: 86 - protein, 8 aa, Artificial Sequence
  Synthetic
GPLNLVGR

SEQ ID NO: 87 - protein, 8 aa, Artificial Sequence
  Synthetic
GPAGLVAD

SEQ ID NO: 88 - protein, 8 aa, Artificial Sequence
  Synthetic
GPANLVAP

SEQ ID NO: 89 - protein, 8 aa, Artificial Sequence
  Synthetic
VPLSLYSG

SEQ ID NO: 90 - protein, 10 aa, Artificial Sequence
  Synthetic
SGESPAYYTA

SEQ ID NO: 91 - protein, 4 aa, Artificial Sequence
  Synthetic
  misc_feature (2)..(3): Xaa can be any naturally occurring amino acid
  misc_feature (4)..(4): Xaa can be any hydrophobic amino acid residue
PXXX

SEQ ID NO: 92 - protein, 4 aa, Artificial Sequence
  Synthetic
  misc_feature (1)..(1): X is L or I
  misc_feature (2)..(3): Xaa can be any naturally occurring amino acid
  misc_feature (4)..(4): Xaa can be any hydrophobic amino acid residue
XXXX

SEQ ID NO: 93 - protein, 4 aa, Artificial Sequence
  Synthetic
  misc_feature (1)..(1): Xaa can be any hydrophobic amino acid residue
  misc_feature (3)..(3): Xaa can be any naturally occurring amino acid
XSXL

SEQ ID NO: 94 - protein, 4 aa, Artificial Sequence
  Synthetic
  misc_feature (2)..(3): Xaa can be any naturally occurring amino acid
  misc_feature (4)..(4): Xaa can be any hydrophobic amino acid residue
HXXX

SEQ ID NO: 95-99 - skipped (5 entries)

SEQ ID NO: 100 - protein, 397 aa, Artificial Sequence
  Synthetic
APTSSSTSSSTAEAQQQQQQQQQQQQHLEQLLMDLQELLSRMENYRNLKLPRMLTFKFYLPKQATELKDLQCLEDELGPLRHVLDLTQSKSFQLEDAENFISNIRVTVVKLKGSDNTFECQFDDESATVVDFLRRWIAFCQSIISTSPQSGGGGSGGGGGPLGVRGGGGGSGGGGSELCLYDPPEVPNATFKALSYKNGTILNCECKRGFRRLKELVYMRCLGNSWSSNCQCTSNSHDKSRKQVTAQLEHQKEQQTTTDMQKPTQSMHQENLTGHCREPPPWKHEDSKRIYHFVEGQSVHYECIPGYKALQRGPAISICKMKCGKTGWTQPQLTCVDEREHHRFLASEESQGSRNSSPESETSCPITTTDFPQPTETTAMTETFVLTMEYKHHHHHH

SEQ ID NO: 101 - protein, 613 aa, Artificial Sequence
  Synthetic
APTSSSTSSSTAEAQQQQQQQQQQQQHLEQLLMDLQELLSRMENYRNLKLPRMLTFKFYLPKQATELKDLQCLEDELGPLRHVLDLTQSKSFQLEDAENFISNIRVTVVKLKGSDNTFECQFDDESATVVDFLRRWIAFCQSIISTSPQSGGGGSGGGGGPLGVRGGGGGSGGGGSELCLYDPPEVPNATFKALSYKNGTILNCECKRGFRRLKELVYMRCLGNSWSSNCQCTSNSHDKSRKQVTAQLEHQKEQQTTTDMQKPTQSMHQENLTGHCREPPPWKHEDSKRIYHFVEGQSVHYECIPGYKALQRGPAISICKMKCGKTGWTQPQLTCVDEREHHRFLASEESQGSRNSSPESETSCPITTTDFPQPTETTAMTETFVLTMEYKGCKPCICTVPEVSSVFIFPPKPKDVLTITLTPKVTCVVVDISKDDPEVQFSWFVDDVEVHTAQTQPREEQFNSTFRSVSELPIMHQDWLNGKEFKCRVNSAAFPAPIEKTISKTKGRPKAPQVYTIPPPKEQMAKDKVSLTCMITDFFPEDITVEWQWNGQPAENYKNTQPIMDTDGSYFVYSKLNVQKSNWEAGNTFTCSVLHEGLHNHHTEKSLSHSPGK

SEQ ID NO: 102 - protein, 618 aa, Artificial Sequence
  Synthetic
APTSSSTSSSTAEAQQQQQQQQQQQQHLEQLLMDLQELLSRMENYRNLKLPRMLTFKFYLPKQATELKDLQCLEDELGPLRHVLDLTQSKSFQLEDAENFISNIRVTVVKLKGSDNTFECQFDDESATVVDFLRRWIAFSQSIISTSPQSGGGGSGGGGGPLGVRGGGGGSGGGGSELCLYDPPEVPNATFKALSYKNGTILNCECKRGFRRLKELVYMRCLGNSWSSNCQCTSNSHDKSRKQVTAQLEHQKEQQTTTDMQKPTQSMHQENLTGHCREPPPWKHEDSKRIYHFVEGQSVHYECIPGYKALQRGPAISICKMKCGKTGWTQPQLTCVDEREHHRFLASEESQGSRNSSPESETSCPITTTDFPQPTETTAMTETFVLTMEYKGCKPCICTVPEVSSVFIFPPKPKDVLMITLTPKVTCVVVDISKDDPEVQFSWFVDDVEVHTAQTQPREEQFNSTFRSVSELPIMHQDWLNGKEFKCRVNSAAFPAPIEKTISKTKGRPKAPQVYTIPPPKEQMAKDKVSLTCMITDFFPEDITVEWQWNGQPAENYKNTQPIMDTDGSYFVYSKLNVQKSNWEAGNTFTCSVLHEGLHNHHTEKSLSHSPGHHHHHH

SEQ ID NO: 103 - protein, 623 aa, Artificial Sequence
  Synthetic
APTSSSTSSSTAEAQQQQQQQQQQQQHLEQLLMDLQELLSRMENYRNLKLPRMLTFKFYLPKQATELKDLQCLEDELGPLRHVLDLTQSKSFQLEDAENFISNIRVTVVKLKGSDNTFECQFDDESATVVDFLRRWIAFSQSIISTSPQSGGGGSGGGGGPLGVRGGGGGSGGGGSELCLYDPPEVPNATFKALSYKNGTILNCECKRGFRRLKELVYMRCLGNSWSSNCQCTSNSHDKSRKQVTAQLEHQKEQQTTTDMQKPTQSMHQENLTGHCREPPPWKHEDSKRIYHFVEGQSVHYECIPGYKALQRGPAISICKMKCGKTGWTQPQLTCVDEREHHRFLASEESQGSRNSSPESETSCPITTTDFPQPTETTAMTETFVLTMEYKDKTHTCPPCPAPELLGGPSVFLFPPKPKDTLMISRTPEVTCVVVDVSHEDPEVKFNWYVDGVEVHNAKTKPREEQYNSTYRVVSVLTVLHQDWLNGKEYKCKVSNKALPAPIEKTISKAKGQPREPQVYTLPPSRDELTKNQVSLTCLVKGFYPSDIAVEWESNGQPENNYKTTPPVLDSDGSFFLYSKLTVDKSRWQQGNVFSCSVMHEALHNHYTQKSLSLSPGHHHHHH

SEQ ID NO: 104 - protein, 611 aa, Artificial Sequence
  Synthetic
APTSSSTKKTQLQLEHLLLDLQMILNGINNYKNPKLTRMLTFKFYMPKKATELKHLQCLEEELKPLEEVLNLAQSKNFHLRPRDLISNINVIVLELKGSETTFMCEYADETATIVEFLNRWITFSQSIISTLTSGGGGSGGGGGPLGVRGGGGGSGGGGSELCDDDPPEIPHATFKAMAYKEGTMLNCECKRGFRRIKSGSLYMLCTGNSSHSSWDNQCQCTSSATRNTTKQVTPQPEEQKERKTTEMQSPMQPVDQASLPGHCREPPPWENEATERIYHFVVGQMVYYQCVQGYRALHRGPAESVCKMTHGKTRWTQPQLICTGEMETSQFPGEEKPQASPEGRPESETSCLVTTTDFQIQTEMAATMETSIFTTEYQDKTHTCPPCPAPELLGGPSVFLFPPKPKDTLMISRTPEVTCVVVDVSHEDPEVKFNWYVDGVEVHNAKTKPREEQYNSTYRVVSVLTVLHQDWLNGKEYKCKVSNKALPAPIEKTISKAKGQPREPQVYTLPPSRDELTKNQVSLTCLVKGFYPSDIAVEWESNGQPENNYKTTPPVLDSDGSFFLYSKLTVDKSRWQQGNVFSCSVMHEALHNHYTQKSLSLSPGHHHHHH

SEQ ID NO: 105 - protein, 613 aa, Artificial Sequence
  Synthetic
GCKPCICTVPEVSSVFIFPPKPKDVLTITLTPKVTCVVVDISKDDPEVQFSWFVDDVEVHTAQTQPREEQFNSTFRSVSELPIMHQDWLNGKEFKCRVNSAAFPAPIEKTISKTKGRPKAPQVYTIPPPKEQMAKDKVSLTCMITDFFPEDITVEWQWNGQPAENYKNTQPIMDTDGSYFVYSKLNVQKSNWEAGNTFTCSVLHEGLHNHHTEKSLSHSPGKAPTSSSTSSSTAEAQQQQQQQQQQQQHLEQLLMDLQELLSRMENYRNLKLPRMLTFKFYLPKQATELKDLQCLEDELGPLRHVLDLTQSKSFQLEDAENFISNIRVTVVKLKGSDNTFECQFDDESATVVDFLRRWIAFCQSIISTSPQSGGGGSGGGGGPLGVRGGGGGSGGGGSELCLYDPPEVPNATFKALSYKNGTILNCECKRGFRRLKELVYMRCLGNSWSSNCQCTSNSHDKSRKQVTAQLEHQKEQQTTTDMQKPTQSMHQENLTGHCREPPPWKHEDSKRIYHFVEGQSVHYECIPGYKALQRGPAISICKMKCGKTGWTQPQLTCVDEREHHRFLASEESQGSRNSSPESETSCPITTTDFPQPTETTAMTETFVLTMEYK

SEQ ID NO: 106 - protein, 611 aa, Artificial Sequence; identical to SEQ ID NO: 104
  Synthetic

SEQ ID NO: 107 - protein, 611 aa, Artificial Sequence
  Synthetic
APTSSSTKKTQLQLEHLLLDLQMILNGINNYKNPKLTRMLTFKFYMPKKATELKHLQCLEEELKPLEEVLNLAQSKNFHLRPRDLISNINVIVLELKGSETTFMCEYADETATIVEFLNRWITFCQSIISTLTSGGGGSGGGGGPLGVRGGGGGSGGGGSELCDDDPPEIPHATFKAMAYKEGTMLNCECKRGFRRIKSGSLYMLCTGNSSHSSWDNQCQCTSSATRNTTKQVTPQPEEQKERKTTEMQSPMQPVDQASLPGHCREPPPWENEATERIYHFVVGQMVYYQCVQGYRALHRGPAESVCKMTHGKTRWTQPQLICTGEMETSQFPGEEKPQASPEGRPESETSCLVTTTDFQIQTEMAATMETSIFTTEYQDKTHTCPPCPAPELLGGPSVFLFPPKPKDTLMISRTPEVTCVVVDVSHEDPEVKFNWYVDGVEVHNAKTKPREEQYNSTYRVVSVLTVLHQDWLNGKEYKCKVSNKALPAPIEKTISKAKGQPREPQVYTLPPSRDELTKNQVSLTCLVKGFYPSDIAVEWESNGQPENNYDTTPPVLDSDGSFFLYSDLTVDKSRWQQGNVFSCSVMHEALHNHYTQKSLSLSPGHHHHHH

SEQ ID NO: 108 - protein, 232 aa, Artificial Sequence
  Synthetic
DKTHTCPPCPAPELLGGPSVFLFPPKPKDTLMISRTPEVTCVVVDVSHEDPEVKFNWYVDGVEVHNAKTKPREEQYNSTYRVVSVLTVLHQDWLNGKEYKCKVSNKALPAPIEKTISKAKGQPREPQVYTLPPSRKELTKNQVSLTCLVKGFYPSDIAVEWESNGQPENNYKTTPPVLKSDGSFFLYSKLTVDKSRWQQGNVFSCSVMHEALHNHYTQKSLSLSPGHHHHHH

SEQ ID NO: 109 - protein, 605 aa, Artificial Sequence
  Synthetic
DKTHTCPPCPAPELLGGPSVFLFPPKPKDTLMISRTPEVTCVVVDVSHEDPEVKFNWYVDGVEVHNAKTKPREEQYNSTYRVVSVLTVLHQDWLNGKEYKCKVSNKALPAPIEKTISKAKGQPREPQVYTLPPSRDELTKNQVSLTCLVKGFYPSDIAVEWESNGQPENNYKTTPPVLDSDGSFFLYSKLTVDKSRWQQGNVFSCSVMHEALHNHYTQKSLSLSPGAPTSSSTKKTQLQLEHLLLDLQMILNGINNYKNPKLTRMLTFKFYMPKKATELKHLQCLEEELKPLEEVLNLAQSKNFHLRPRDLISNINVIVLELKGSETTFMCEYADETATIVEFLNRWITFSQSIISTLTSGGGGSGGGGGPLGVRGGGGGSGGGGSELCDDDPPEIPHATFKAMAYKEGTMLNCECKRGFRRIKSGSLYMLCTGNSSHSSWDNQCQCTSSATRNTTKQVTPQPEEQKERKTTEMQSPMQPVDQASLPGHCREPPPWENEATERIYHFVVGQMVYYQCVQGYRALHRGPAESVCKMTHGKTRWTQPQLICTGEMETSQFPGEEKPQASPEGRPESETSCLVTTTDFQIQTEMAATMETSIFTTEYQ

SEQ ID NO: 110 - protein, 600 aa, Artificial Sequence
  Synthetic
APTSSSTKKTQLQLEHLLLDLQMILNGINNYKNPKLTRMLTFKFYMPKKATELKHLQCLEEELKPLEEVLNLAQSKNFHLRPRDLISNINVIVLELKGSETTFMCEYADETATIVEFLNRWITFCQSIISTLTSGGGGSGGGGGPLGVRGGGGGSGGGGSAVNGTSQFTCFYNSRANISCVWSQDGALQDTSCQVHAWPDRRRWNQTCELLPVSQASWACNLILGAPDSQKLTTVDIVTLRVLCREGVRWRVMAIQDFKPFENLRLMAPISLQVVHVETHRCNISWEISQASHYFERHLEFEARTLSPGHTWEEAPLLTLKQKQEWICLETLTPDTQYEFQVRVKPLQGEFTTWSPWSQPLAFRTKPAALGKDTDKTHTCPPCPAPELLGGPSVFLFPPKPKDTLMISRTPEVTCVVVDVSHEDPEVKFNWYVDGVEVHNAKTKPREEQYNSTYRVVSVLTVLHQDWLNGKEYKCKVSNKALPAPIEKTISKAKGQPREPQVYTLPPSRDELTKNQVSLTCLVKGFYPSDIAVEWESNGQPENNYKTTPPVLDSDGSFFLYSKLTVDKSRWQQGNVFSCSVMHEALHNHYTQKSLSLSPG

SEQ ID NO: 111 - protein, 626 aa, Artificial Sequence
  Synthetic
APTSSSTKKTQLQLEHLLLDLQMILNGINNYKNPKLTRMLTFKFYMPKKATELKHLQCLEEELKPLEEVLNLAQSKNFHLRPRDLISNINVIVLELKGSETTFMCEYADETATIVEFLNRWITFCQSIISTLTSGGGGSGGGGGPLGVRGGGGGSGGGGSLNTTILTPNGNEDTTADFFLTTMPTDSLSVSTLPLPEVQCFVFNVEYMNCTWNSSSEPQPTNLTLHYWYKNSDNDKVQKCSHYLFSEEITSGCQLQKKEIHLYQTFVVQLQDPREPRRQATQMLKLQNLVIPWAPENLTLHKLSESQLELNWNNRFLNHCLEHLVQYRTDWDHSWTEQSVDYRHKFSLPSVDGQKRYTFRVRSRFNPLCGSAQHWSEWSHPIHWGSNTSKENPFLFALEADKTHTCPPCPAPELLGGPSVFLFPPKPKDTLMISRTPEVTCVVVDVSHEDPEVKFNWYVDGVEVHNAKTKPREEQYNSTYRVVSVLTVLHQDWLNGKEYKCKVSNKALPAPIEKTISKAKGQPREPQVYTLPPSRDELTKNQVSLTCLVKGFYPSDIAVEWESNGQPENNYKTTPPVLDSDGSFFLYSKLTVDKSRWQQGNVFSCSVMHEALHNHYTQKSLSLSPG

SEQ ID NO: 112-119 - skipped (8 entries)

SEQ ID NO: 120 - protein, 10 aa, Artificial Sequence
  Synthetic
SGGGGSGGGG

SEQ ID NO: 121-129 - skipped (9 entries)

SEQ ID NO: 130 - DNA, 1254 bp, Artificial Sequence
  Synthetic
atgggttggtcctgcatcatcctgttcctggtcgccaccgccactggggtccactccgcacctacatcatcatcaacttcatcctccaccgctgaggctcagcaacaacagcaacaacagcagcagcagcagcagcatctggagcagctgctgatggacctgcaggagctgctgtccagaatggagaactaccgcaatctgaagctgccaaggatgctgaccttcaagttttatctgcccaagcaggccacagagctgaaggacctgcagtgcctggaggatgagctgggcccactgaggcacgtgctggacctgacccagagcaagtctttccagctggaggatgctgagaactttatctccaatatccgggtgaccgtggtgaagctgaagggcagcgacaacacattcgagtgccagtttgacgatgagtctgccaccgtggtggatttcctgaggcggtggatcgctttttgtcagagcatcatctccacaagccctcagtctggaggaggtggcagcggaggaggaggtggcccactgggcgtgaggggtggcggcggcggctctggcggcggcggctccgagctgtgcctgtacgacccccctgaggtgcccaatgccaccttcaaggctctgtcttataagaacggcacaatcctgaattgcgagtgtaagaggggctttagacgcctgaaggagctggtgtacatgcggtgtctgggcaactcctggtccagcaattgccagtgtacctctaactcccatgacaagagcagaaagcaggtgacagcccagctggagcaccagaaggagcagcagaccacaaccgatatgcagaagcccacccagtctatgcaccaggagaatctgacaggccattgcagagagccacccccttggaagcacgaggatagcaagcgcatctatcatttcgtggagggccagtctgtgcactacgagtgtatccccggctataaggccctgcagagaggccctgctatctccatctgcaagatgaagtgtggcaagaccggctggacacagcctcagctgacctgcgtggacgagagggagcaccatcggttcctggctagcgaggagtctcagggctcccgcaactcttcccctgagagcgagacatcttgtccaatcacaaccacagattttccacagcccaccgagacaaccgctatgacagagaccttcgtgctgactatggaatacaaacaccaccaccaccaccactaatga

SEQ ID NO: 131 - DNA, 1902 bp, Artificial Sequence
  Synthetic
atgggttggtcctgcatcatcctgttcctggtcgccaccgccactggggtccactccgcacctacatcatcatcaacttcatcctccaccgctgaggctcagcaacaacagcaacaacagcagcagcagcagcagcatctggagcagctgctgatggacctgcaggagctgctgtccagaatggagaactaccgcaatctgaagctgccaaggatgctgaccttcaagttttatctgcccaagcaggccacagagctgaaggacctgcagtgcctggaggatgagctgggcccactgaggcacgtgctggacctgacccagagcaagtctttccagctggaggatgctgagaactttatctccaatatccgggtgaccgtggtgaagctgaagggcagcgacaacacattcgagtgccagtttgacgatgagtctgccaccgtggtggatttcctgaggcggtggatcgctttttgtcagagcatcatctccacaagccctcagtctggaggaggtggcagcggaggaggaggtggcccactgggcgtgaggggtggcggcggcggctctggcggcggcggctccgagctgtgcctgtacgacccccctgaggtgcccaatgccaccttcaaggctctgtcttataagaacggcacaatcctgaattgcgagtgtaagaggggctttagacgcctgaaggagctggtgtacatgcggtgtctgggcaactcctggtccagcaattgccagtgtacctctaactcccatgacaagagcagaaagcaggtgacagcccagctggagcaccagaaggagcagcagaccacaaccgatatgcagaagcccacccagtctatgcaccaggagaatctgacaggccattgcagagagccacccccttggaagcacgaggatagcaagcgcatctatcatttcgtggagggccagtctgtgcactacgagtgtatccccggctataaggccctgcagagaggccctgctatctccatctgcaagatgaagtgtggcaagaccggctggacacagcctcagctgacctgcgtggacgagagggagcaccatcggttcctggctagcgaggagtctcagggctcccgcaactcttcccctgagagcgagacatcttgtccaatcacaaccacagattttccacagcccaccgagacaaccgctatgacagagaccttcgtgctgactatggaatacaaaggatgcaaaccctgtatctgtaccgtgcccgaggtctcttccgtctttattttcccccccaagcctaaggatgtgctgactattactctgacccccaaggtgacatgcgtggtggtggacatcagcaaggacgatcctgaggtgcagttctcttggtttgtggacgatgtggaggtgcacaccgcccagacacagccaagggaggagcagttcaatagcacctttcggtccgtgagcgagctgcccatcatgcatcaggattggctgaatggcaaggagttcaagtgcagagtgaactctgccgcttttcccgctcctatcgagaagaccatctccaagacaaagggccgcccaaaggctccacaggtgtacaccatcccacctccaaaggagcagatggctaaggacaaggtgtctctgacctgtatgatcacagacttctttcctgaggacatcacagtggagtggcagtggaacggccagcctgccgagaactataagaatacccagccaatcatggacacagatggctcttacttcgtgtattccaagctgaacgtgcagaagtccaattgggaggctggcaacacctttacatgtagcgtgctgcacgaaggtctgcataaccatcataccgaaaaatcactgtcacactcccctggaaaataatga

SEQ ID NO: 132 - DNA, 1917 bp, Artificial Sequence
  Synthetic
atgggttggtcctgcatcatcctgttcctggtcgccaccgccactggggtccactccgcacctacatcatcatcaacttcatcctccaccgctgaggctcagcaacaacagcaacaacagcagcagcagcagcagcatctggagcagctgctgatggacctgcaggagctgctgtccagaatggagaactaccgcaatctgaagctgccaaggatgctgaccttcaagttttatctgcccaagcaggccacagagctgaaggacctgcagtgcctggaggatgagctgggcccactgaggcacgtgctggacctgacccagagcaagtctttccagctggaggatgctgagaactttatctccaatatccgggtgaccgtggtgaagctgaagggcagcgacaacacattcgagtgccagtttgacgatgagtctgccaccgtggtggatttcctgaggcggtggatcgctttttcccagagcatcatctccacaagccctcagtctggaggaggtggcagcggaggaggaggtggcccactgggcgtgaggggtggcggcggcggctctggcggcggcggctccgagctgtgcctgtacgacccccctgaggtgcccaatgccaccttcaaggctctgtcttataagaacggcacaatcctgaattgcgagtgtaagaggggctttagacgcctgaaggagctggtgtacatgcggtgtctgggcaactcctggtccagcaattgccagtgtacctctaactcccatgacaagagcagaaagcaggtgacagcccagctggagcaccagaaggagcagcagaccacaaccgatatgcagaagcccacccagtctatgcaccaggagaatctgacaggccattgcagagagccacccccttggaagcacgaggatagcaagcgcatctatcatttcgtggagggccagtctgtgcactacgagtgtatccccggctataaggccctgcagagaggccctgctatctccatctgcaagatgaagtgtggcaagaccggctggacacagcctcagctgacctgcgtggacgagagggagcaccatcggttcctggctagcgaggagtctcagggctcccgcaactcttcccctgagagcgagacatcttgtccaatcacaaccacagattttccacagcccaccgagacaaccgctatgacagagaccttcgtgctgactatggaatacaaaggatgcaaaccctgtatctgtaccgtgcccgaggtctcttccgtctttattttcccccccaagcctaaggatgtgctgatgattactctgacccccaaggtgacatgcgtggtggtggacatcagcaaggacgatcctgaggtgcagttctcttggtttgtggacgatgtggaggtgcacaccgcccagacacagccaagggaggagcagttcaatagcacctttcggtccgtgagcgagctgcccatcatgcatcaggattggctgaatggcaaggagttcaagtgcagagtgaactctgccgcttttcccgctcctatcgagaagaccatctccaagacaaagggccgcccaaaggctccacaggtgtacaccatcccacctccaaaggagcagatggctaaggacaaggtgtctctgacctgtatgatcacagacttctttcctgaggacatcacagtggagtggcagtggaacggccagcctgccgagaactataagaatacccagccaatcatggacacagatggctcttacttcgtgtattccaagctgaacgtgcagaagtccaattgggaggctggcaacacctttacatgtagcgtgctgcacgaaggtctgcataaccatcataccgaaaaatcactgtcacactcccctggacaccaccaccaccaccactaatga

SEQ ID NO: 133 - DNA, 1932 bp, Artificial Sequence
  Synthetic
atgggttggtcctgcatcatcctgttcctggtcgccaccgccactggggtccactccgcacctacatcatcatcaacttcatcctccaccgctgaggctcagcaacaacagcaacaacagcagcagcagcagcagcatctggagcagctgctgatggacctgcaggagctgctgtccagaatggagaactaccgcaatctgaagctgccaaggatgctgaccttcaagttttatctgcccaagcaggccacagagctgaaggacctgcagtgcctggaggatgagctgggcccactgaggcacgtgctggacctgacccagagcaagtctttccagctggaggatgctgagaactttatctccaatatccgggtgaccgtggtgaagctgaagggcagcgacaacacattcgagtgccagtttgacgatgagtctgccaccgtggtggatttcctgaggcggtggatcgctttttcccagagcatcatctccacaagccctcagtctggaggaggtggcagcggaggaggaggtggcccactgggcgtgaggggtggcggcggcggctctggcggcggcggctccgagctgtgcctgtacgacccccctgaggtgcccaatgccaccttcaaggctctgtcttataagaacggcacaatcctgaattgcgagtgtaagaggggctttagacgcctgaaggagctggtgtacatgcggtgtctgggcaactcctggtccagcaattgccagtgtacctctaactcccatgacaagagcagaaagcaggtgacagcccagctggagcaccagaaggagcagcagaccacaaccgatatgcagaagcccacccagtctatgcaccaggagaatctgacaggccattgcagagagccacccccttggaagcacgaggatagcaagcgcatctatcatttcgtggagggccagtctgtgcactacgagtgtatccccggctataaggccctgcagagaggccctgctatctccatctgcaagatgaagtgtggcaagaccggctggacacagcctcagctgacctgcgtggacgagagggagcaccatcggttcctggctagcgaggagtctcagggctcccgcaactcttcccctgagagcgagacatcttgtccaatcacaaccacagattttccacagcccaccgagacaaccgctatgacagagaccttcgtgctgactatggaatacaaagataagactcatacctgtccaccctgtcctgctcctgaactgctgggcggtccttccgtgttcctgttccctccaaaacctaaagataccctgatgatctccaggacccctgaggtgacatgcgtggtggtggacgtgagccacgaggaccccgaggtgaagttcaactggtacgtggacggcgtggaggtgcataatgccaagacaaagcccagggaggagcagtacaacagcacctatcgggtggtgtctgtgctgacagtgctgcaccaggattggctgaacggcaaggagtataagtgcaaggtgtctaataaggccctgcctgctccaatcgagaagaccatctccaaggccaagggccagcccagagagcctcaggtgtacacactgccccctagccgcgacgagctgaccaagaaccaggtgtctctgacatgtctggtgaagggcttctatccatctgacatcgctgtggagtgggagtccaatggccagcccgagaacaattacaagaccacaccacccgtgctggactctgatggctccttctttctgtattccaagctgaccgtggacaagagcagatggcagcagggcaacgtgttctcctgtagcgtgatgcacgaagccctgcacaaccattacactcagaaaagcctgtccctgtcccctgggcaccaccaccaccaccactaatga

SEQ ID NO: 134 - DNA, 1794 bp, Artificial Sequence
  Synthetic
atgggttggtcctgcatcatcctgttcctggtcgccaccgccactggggtccactccgcacctacatcatcatcaacttcatcctccaccgctgaggctcagcaacaacagcaacaacagcagcagcagcagcagcatctggagcagctgctgatggacctgcaggagctgctgtccagaatggagaactaccgcaatctgaagctgccaaggatgctgaccttcaagttttatctgcccaagcaggccacagagctgaaggacctgcagtgcctggaggatgagctgggcccactgaggcacgtgctggacctgacccagagcaagtctttccagctggaggatgctgagaactttatctccaatatccgggtgaccgtggtgaagctgaagggcagcgacaacacattcgagtgccagtttgacgatgagtctgccaccgtggtggatttcctgaggcggtggatcgctttttcccagagcatcatctccacaagccctcagtctggaggaggtggcagcggaggaggaggtggcccactgggcgtgaggggtggcggcggcggctctggcggcggcggctccgagctgtgcctgtacgacccccctgaggtgcccaatgccaccttcaaggctctgtcttataagaacggcacaatcctgaattgcgagtgtaagaggggctttagacgcctgaaggagctggtgtacatgcggtgtctgggcaactcctggtccagcaattgccagtgtacctctaactcccatgacaagagcagaaagcaggtgacagcccagctggagcaccagaaggagcagcagaccacaaccgatatgcagaagcccacccagtctatgcaccaggagaatctgacaggccattgcagagagccacccccttggaagcacgaggatagcaagcgcatctatcatttcgtggagggccagtctgtgcactacgagtgtatccccggctataaggccctgcagagaggccctgctatctccatctgcaagatgaagtgtggcaagaccggctggacacagcctcagctgacctgcgtggacgagagggagcaccatcggttcctggctagcgaggagtctggatgcaaaccctgtatctgtaccgtgcccgaggtctcttccgtctttattttcccccccaagcctaaggatgtgctgatgattactctgacccccaaggtgacatgcgtggtggtggacatcagcaaggacgatcctgaggtgcagttctcttggtttgtggacgatgtggaggtgcacaccgcccagacacagccaagggaggagcagttcaatagcacctttcggtccgtgagcgagctgcccatcatgcatcaggattggctgaatggcaaggagttcaagtgcagagtgaactctgccgcttttcccgctcctatcgagaagaccatctccaagacaaagggccgcccaaaggctccacaggtgtacaccatcccacctccaaaggagcagatggctaaggacaaggtgtctctgacctgtatgatcacagacttctttcctgaggacatcacagtggagtggcagtggaacggccagcctgccgagaactataagaatacccagccaatcatggacacagatggctcttacttcgtgtattccaagctgaacgtgcagaagtccaattgggaggctggcaacacctttacatgtagcgtgctgcacgaaggtctgcataaccatcataccgaaaaatcactgtcacactcccctggacaccaccaccaccaccactaatga

SEQ ID NO: 135 - DNA, 1896 bp, Artificial Sequence
  Synthetic
atgggctggtcctgcatcattctgtttctggtggctaccgccaccggcgtgcactctgctcctacatcctccagcaccaagaaaacccagctgcagttggagcatctgctgctggacctgcagatgatcctgaacggcatcaacaactacaagaaccccaagctgacccggatgctgaccttcaagttctacatgcccaagaaggccaccgagctgaaacatctgcagtgcctggaagaggaactgaagcccctggaagaagtgctgaatctggcccagtccaagaacttccacctgaggcctcgggacctgatctccaacatcaacgtgatcgtgctcgagctgaagggctccgagacaaccttcatgtgcgagtacgccgacgagacagctaccatcgtggaatttctgaaccggtggatcaccttcagccagtccatcatcagcaccctgacatctggcggcggaggatctggcggaggcggaggacctttgggagttcgcggcggtggtggtggcagcggaggtggtggatctgagctgtgtgacgacgaccctcctgagatccctcacgccacctttaaggccatggcttacaaagagggcaccatgctgaactgcgagtgcaagagaggcttccggcggatcaagtccggcagcctgtatatgctgtgcaccggcaactccagccactcctcttgggacaaccagtgccagtgcaccagctctgctacccggaacaccaccaagcaagtgacccctcagcctgaggaacagaaagagcgcaagaccaccgagatgcagagccccatgcagcctgtggatcaggcttctctgcctggccactgtagagagcctccaccttgggagaatgaggctaccgagagaatctaccacttcgtcgtgggacagatggtgtactaccagtgcgtgcagggctaccgcgctctgcatagaggaccagcagagtccgtgtgcaagatgacccacggcaagaccagatggacccagcctcagctgatctgcaccggcgagatggaaacctctcagttccccggcgaggaaaagcctcaggcctctcctgaaggcagacccgagtctgagacatcctgtctcgtgaccaccacagacttccagatccagaccgagatggccgctaccatggaaaccagcatcttcaccaccgagtaccaggacaagacccacacctgtcctccatgtcctgctccagaattgctcggcggaccctccgtgttcctgtttcctccaaagcctaaggacaccctgatgatctctcggacccctgaagtgacctgcgtggtggtcgatgtgtctcacgaggatcccgaagtgaagttcaattggtacgtggacggcgtggaagtgcacaacgccaagaccaagcctagagaggaacagtacaactccacctacagagtggtgtccgtgctgaccgtgctgcaccaggattggctgaatggcaaagagtacaagtgcaaggtgtccaacaaggccctgcctgctcctatcgaaaagaccatctccaaggccaagggccagcctagggaaccccaggtttacaccttgcctccatctcgggacgagctgaccaagaaccaggtgtccctgacctgtctggtcaagggcttctacccctccgatatcgccgtggaatgggagtctaatggccagcctgaaaacaattacaagacaacccctcctgtgctggactccgacggctcattcttcctgtacagcaagctgacagtggacaagtccagatggcagcagggcaacgtgttctcctgctccgtgatgcatgaggccctgcacaaccactacacccagaagtccctgtctctgtcccctggccaccatcaccatcatcactgataa

SEQ ID NO: 136 - DNA, 1896 bp, Artificial Sequence
  Synthetic
atgggttggtcctgcatcatcctgttcctggtcgccaccgccactggggtccactccgcacctacttcaagttctacaaagaaaacacagctacaactggagcatttacttctggatttacagatgattttgaatggaattaataattacaagaatcccaaactcaccaggatgctcacatttaagttttacatgcccaagaaggccacagaactgaaacatcttcagtgtctagaagaagaactcaaacctctggaggaagtgctaaatttagctcaaagcaaaaactttcacttaagacccagggacttaatcagcaatatcaacgtaatagttctggaactaaagggatctgaaacaacattcatgtgtgaatatgctgatgagacagcaaccattgtagaatttctgaacagatggattaccttttgtcaaagcatcatctcaacactgacttctggtggcggtggctctggtggcggtggcggtcctctgggtgtcagaggtggtggcggtggctctggtggcggtggctctgagctctgtgacgatgacccgccagagatcccacacgccacattcaaagccatggcctacaaggaaggaaccatgttgaactgtgaatgcaagagaggtttccgcagaataaaaagcgggtcactctatatgctctgtacaggaaactctagccactcgtcctgggacaaccaatgtcaatgcacaagctctgccactcggaacacaacgaaacaagtgacacctcaacctgaagaacagaaagaaaggaaaaccacagaaatgcaaagtccaatgcagccagtggaccaagcgagccttccaggtcactgcagggaacctccaccatgggaaaatgaagccacagagagaatttatcatttcgtggtggggcagatggtttattatcagtgcgtccagggatacagggctctacacagaggtcctgctgagagcgtctgcaaaatgacccacgggaagacaaggtggacccagccccagctcatatgcacaggtgaaatggagaccagtcagtttccaggtgaagagaagcctcaggcaagccccgaaggccgtcctgagagtgagacttcctgcctcgtcacaacaacagattttcaaatacagacagaaatggctgcaaccatggagacgtccatatttacaacagagtaccaggacaaaactcacacatgcccaccgtgcccagcacctgaactcctggggggaccgtcagtcttcctcttccccccaaaacccaaggacaccctcatgatctcccggacccctgaggtcacatgcgtggtggtggacgtgagccacgaagaccctgaggtcaagttcaactggtacgtggacggcgtggaggtgcataatgccaagacaaagccgcgggaggagcagtacaacagcacgtaccgtgtggtcagcgtcctcaccgtcctgcaccaggactggctgaatggcaaggagtacaagtgcaaggtctccaacaaagccctcccagcccccatcgagaaaaccatctccaaagccaaagggcagccccgagaaccacaggtgtacaccctgcccccatcccgggatgagctgaccaagaaccaggtcagcctgacctgcctggtcaaaggcttctatcccagcgacatcgccgtggagtgggagagcaatgggcagccggagaacaactacgacaccacgcctcccgtgctggactccgacggctccttcttcctctatagcgacctcaccgtggacaagagcaggtggcagcaggggaacgtcttctcatgctccgtgatgcatgaggctctgcacaaccactacacgcagaagagcctctccctgtctccgggtcaccaccaccaccaccactaatga

SEQ ID NO: 137 - DNA, 759 bp, Artificial Sequence
  Synthetic
atgggttggtcctgcatcatcctgttcctggtcgccaccgccactggggtccactccgacaaaactcacacatgcccaccgtgcccagcacctgaactcctggggggaccgtcagtcttcctcttccccccaaaacccaaggacaccctcatgatctcccggacccctgaggtcacatgcgtggtggtggacgtgagccacgaagaccctgaggtcaagttcaactggtacgtggacggcgtggaggtgcataatgccaagacaaagccgcgggaggagcagtacaacagcacgtaccgtgtggtcagcgtcctcaccgtcctgcaccaggactggctgaatggcaaggagtacaagtgcaaggtctccaacaaagccctcccagcccccatcgagaaaaccatctccaaagccaaagggcagccccgagaaccacaggtgtacaccctgcccccatcccggaaagagctgaccaagaaccaggtcagcctgacctgcctggtcaaaggcttctatcccagcgacatcgccgtggagtgggagagcaatgggcagccggagaacaactacaagaccacgcctcccgtgctgaaatccgacggctccttcttcctctatagcaagctcaccgtggacaagagcaggtggcagcaggggaacgtcttctcatgctccgtgatgcatgaggctctgcacaaccactacacgcagaagagcctctccctgtctccgggtcaccaccaccaccaccactaatga

SEQ ID NO: 138 - DNA, 1902 bp, Artificial Sequence
  Synthetic
atgggttggtcctgcatcatcctgttcctggtcgccaccgccactggggtccactccggatgcaaaccctgtatctgtaccgtgcccgaggtctcttccgtctttattttcccccccaagcctaaggatgtgctgactattactctgacccccaaggtgacatgcgtggtggtggacatcagcaaggacgatcctgaggtgcagttctcttggtttgtggacgatgtggaggtgcacaccgcccagacacagccaagggaggagcagttcaatagcacctttcggtccgtgagcgagctgcccatcatgcatcaggattggctgaatggcaaggagttcaagtgcagagtgaactctgccgcttttcccgctcctatcgagaagaccatctccaagacaaagggccgcccaaaggctccacaggtgtacaccatcccacctccaaaggagcagatggctaaggacaaggtgtctctgacctgtatgatcacagacttctttcctgaggacatcacagtggagtggcagtggaacggccagcctgccgagaactataagaatacccagccaatcatggacacagatggctcttacttcgtgtattccaagctgaacgtgcagaagtccaattgggaggctggcaacacctttacatgtagcgtgctgcacgaaggtctgcataaccatcataccgaaaaatcactgtcacactcccctggaaaagcacctacatcatcatcaacttcatcctccaccgctgaggctcagcaacaacagcaacaacagcagcagcagcagcagcatctggagcagctgctgatggacctgcaggagctgctgtccagaatggagaactaccgcaatctgaagctgccaaggatgctgaccttcaagttttatctgcccaagcaggccacagagctgaaggacctgcagtgcctggaggatgagctgggcccactgaggcacgtgctggacctgacccagagcaagtctttccagctggaggatgctgagaactttatctccaatatccgggtgaccgtggtgaagctgaagggcagcgacaacacattcgagtgccagtttgacgatgagtctgccaccgtggtggatttcctgaggcggtggatcgctttttgtcagagcatcatctccacaagccctcagtctggaggaggtggcagcggaggaggaggtggcccactgggcgtgaggggtggcggcggcggctctggcggcggcggctccgagctgtgcctgtacgacccccctgaggtgcccaatgccaccttcaaggctctgtcttataagaacggcacaatcctgaattgcgagtgtaagaggggctttagacgcctgaaggagctggtgtacatgcggtgtctgggcaactcctggtccagcaattgccagtgtacctctaactcccatgacaagagcagaaagcaggtgacagcccagctggagcaccagaaggagcagcagaccacaaccgatatgcagaagcccacccagtctatgcaccaggagaatctgacaggccattgcagagagccacccccttggaagcacgaggatagcaagcgcatctatcatttcgtggagggccagtctgtgcactacgagtgtatccccggctataaggccctgcagagaggccctgctatctccatctgcaagatgaagtgtggcaagaccggctggacacagcctcagctgacctgcgtggacgagagggagcaccatcggttcctggctagcgaggagtctcagggctcccgcaactcttcccctgagagcgagacatcttgtccaatcacaaccacagattttccacagcccaccgagacaaccgctatgacagagaccttcgtgctgactatggaatacaaataatga

SEQ ID NO: 139 - DNA, 1863 bp, Artificial Sequence
  Synthetic
atgggttggtcctgcatcatcctgttcctggtcgccaccgccactggggtccactccgcacctacttcaagttctacaaagaaaacacagctacaactggagcatttacttctggatttacagatgattttgaatggaattaataattacaagaatcccaaactcaccaggatgctcacatttaagttttacatgcccaagaaggccacagaactgaaacatcttcagtgtctagaagaagaactcaaacctctggaggaagtgctaaatttagctcaaagcaaaaactttcacttaagacccagggacttaatcagcaatatcaacgtaatagttctggaactaaagggatctgaaacaacattcatgtgtgaatatgctgatgagacagcaaccattgtagaatttctgaacagatggattaccttttgtcaaagcatcatctcaacactgacttctggtggcggtggctctggtggcggtggcggtcctctgggtgtcagaggtggtggcggtggctctggtggcggtggctctgcggtgaatggcacttcccagttcacatgcttctacaactcgagagccaacatctcctgtgtctggagccaagatggggctctgcaggacacttcctgccaagtccatgcctggccggacagacggcggtggaaccaaacctgtgagctgctccccgtgagtcaagcatcctgggcctgcaacctgatcctcggagccccagattctcagaaactgaccacagttgacatcgtcaccctgagggtgctgtgccgtgagggggtgcgatggagggtgatggccatccaggacttcaagccctttgagaaccttcgcctgatggcccccatctccctccaagttgtccacgtggagacccacagatgcaacataagctgggaaatctcccaagcctcccactactttgaaagacacctggagttcgaggcccggacgctgtccccaggccacacctgggaggaggcccccctgctgactctcaagcagaagcaggaatggatctgcctggagacgctcaccccagacacccagtatgagtttcaggtgcgggtcaagcctctgcaaggcgagttcacgacctggagcccctggagccagcccctggccttcaggacaaagcctgcagcccttgggaaggacaccgacaagacccacacctgtcctccatgtcctgctccagaattgctcggcggaccctccgtgttcctgtttcctccaaagcctaaggacaccctgatgatctctcggacccctgaagtgacctgcgtggtggtcgatgtgtctcacgaggatcccgaagtgaagttcaattggtacgtggacggcgtggaagtgcacaacgccaagaccaagcctagagaggaacagtacaactccacctacagagtggtgtccgtgctgaccgtgctgcaccaggattggctgaatggcaaagagtacaagtgcaaggtgtccaacaaggccctgcctgctcctatcgaaaagaccatctccaaggccaagggccagcctagggaaccccaggtttacaccttgcctccatctcgggacgagctgaccaagaaccaggtgtccctgacctgtctggtcaagggcttctacccctccgatatcgccgtggaatgggagtctaatggccagcctgaaaacaattacaagacaacccctcctgtgctggactccgacggctcattcttcctgtacagcaagctgacagtggacaagtccagatggcagcagggcaacgtgttctcctgctccgtgatgcatgaggccctgcacaaccactacacccagaagtccctgtctctgtcccctggctaatga

SEQ ID NO: 140 - DNA, 1941 bp, Artificial Sequence
  Synthetic
atgggttggtcctgcatcatcctgttcctggtcgccaccgccactggggtccactccgcacctacttcaagttctacaaagaaaacacagctacaactggagcatttacttctggatttacagatgattttgaatggaattaataattacaagaatcccaaactcaccaggatgctcacatttaagttttacatgcccaagaaggccacagaactgaaacatcttcagtgtctagaagaagaactcaaacctctggaggaagtgctaaatttagctcaaagcaaaaactttcacttaagacccagggacttaatcagcaatatcaacgtaatagttctggaactaaagggatctgaaacaacattcatgtgtgaatatgctgatgagacagcaaccattgtagaatttctgaacagatggattaccttttgtcaaagcatcatctcaacactgacttctggtggcggtggctctggtggcggtggcggtcctctgggtgtcagaggtggtggcggtggctctggtggcggtggctctctgaacacgacaattctgacgcccaatgggaatgaagacaccacagctgatttcttcctgaccactatgcccactgactccctcagtgtttccactctgcccctcccagaggttcagtgttttgtgttcaatgtcgagtacatgaattgcacttggaacagcagctctgagccccagcctaccaacctcactctgcattattggtacaagaactcggataatgataaagtccagaagtgcagccactatctattctctgaagaaatcacttctggctgtcagttgcaaaaaaaggagatccacctctaccaaacatttgttgttcagctccaggacccacgggaacccaggagacaggccacacagatgctaaaactgcagaatctggtgatcccctgggctccagagaacctaacacttcacaaactgagtgaatcccagctagaactgaactggaacaacagattcttgaaccactgtttggagcacttggtgcagtaccggactgactgggaccacagctggactgaacaatcagtggattatagacataagttctccttgcctagtgtggatgggcagaaacgctacacgtttcgtgttcggagccgctttaacccactctgtggaagtgctcagcattggagtgaatggagccacccaatccactgggggagcaatacttcaaaagagaatcctttcctgtttgcattggaagccgacaagacccacacctgtcctccatgtcctgctccagaattgctcggcggaccctccgtgttcctgtttcctccaaagcctaaggacaccctgatgatctctcggacccctgaagtgacctgcgtggtggtcgatgtgtctcacgaggatcccgaagtgaagttcaattggtacgtggacggcgtggaagtgcacaacgccaagaccaagcctagagaggaacagtacaactccacctacagagtggtgtccgtgctgaccgtgctgcaccaggattggctgaatggcaaagagtacaagtgcaaggtgtccaacaaggccctgcctgctcctatcgaaaagaccatctccaaggccaagggccagcctagggaaccccaggtttacaccttgcctccatctcgggacgagctgaccaagaaccaggtgtccctgacctgtctggtcaagggcttctacccctccgatatcgccgtggaatgggagtctaatggccagcctgaaaacaattacaagacaacccctcctgtgctggactccgacggctcattcttcctgtacagcaagctgacagtggacaagtccagatggcagcagggcaacgtgttctcctgctccgtgatgcatgaggccctgcacaaccactacacccagaagtccctgtctctgtcccctggctaatga

SEQ ID NO: 141-149 - skipped (9 entries)

SEQ ID NO: 150 - DNA, 57 bp, Artificial Sequence
  Synthetic
atgggttggtcctgcatcatcctgttcctggtcgccaccgccactggggtccactcc

SEQ ID NO: 151 - DNA, 447 bp, Artificial Sequence
  Synthetic
gcacctacatcatcatcaacttcatcctccaccgctgaggctcagcaacaacagcaacaacagcagcagcagcagcagcatctggagcagctgctgatggacctgcaggagctgctgtccagaatggagaactaccgcaatctgaagctgccaaggatgctgaccttcaagttttatctgcccaagcaggccacagagctgaaggacctgcagtgcctggaggatgagctgggcccactgaggcacgtgctggacctgacccagagcaagtctttccagctggaggatgctgagaactttatctccaatatccgggtgaccgtggtgaagctgaagggcagcgacaacacattcgagtgccagtttgacgatgagtctgccaccgtggtggatttcctgaggcggtggatcgctttttgtcagagcatcatctccacaagccctcag

SEQ ID NO: 152 - DNA, 21 bp, Artificial Sequence
  Synthetic
ggcccactgggcgtgaggggt

SEQ ID NO: 153 - DNA, 30 bp, Artificial Sequence
  Synthetic
tctggaggaggtggcagcggaggaggaggt

SEQ ID NO: 154 - DNA, 645 bp, Artificial Sequence
  Synthetic
gagctgtgcctgtacgacccccctgaggtgcccaatgccaccttcaaggctctgtcttataagaacggcacaatcctgaattgcgagtgtaagaggggctttagacgcctgaaggagctggtgtacatgcggtgtctgggcaactcctggtccagcaattgccagtgtacctctaactcccatgacaagagcagaaagcaggtgacagcccagctggagcaccagaaggagcagcagaccacaaccgatatgcagaagcccacccagtctatgcaccaggagaatctgacaggccattgcagagagccacccccttggaagcacgaggatagcaagcgcatctatcatttcgtggagggccagtctgtgcactacgagtgtatccccggctataaggccctgcagagaggccctgctatctccatctgcaagatgaagtgtggcaagaccggctggacacagcctcagctgacctgcgtggacgagagggagcaccatcggttcctggctagcgaggagtctcagggctcccgcaactcttcccctgagagcgagacatcttgtccaatcacaaccacagattttccacagcccaccgagacaaccgctatgacagagaccttcgtgctgactatggaatacaaa

SEQ ID NO: 155 - DNA, 18 bp, Artificial Sequence
  Synthetic
caccaccaccaccaccac

SEQ ID NO: 156 - DNA, 6 bp, Artificial Sequence
  Synthetic
taatga

SEQ ID NO: 157 - DNA, 446 bp, Artificial Sequence
  Synthetic
gcacctacatcatcatcaacttcatcctccaccgctgaggctcagcaacaacagcaacaacagcagcagcagcagcagcatctggagcagctgctgatggacctgcaggagctgctgtccagaatggagaactaccgcaatctgaagctgccaaggatgctgaccttcaagttttatctgcccaagcaggccacagagctgaaggacctgcagtgcctggaggatgagctgggcccactgaggcacgtgctggacctgacccagagcaagtctttccagctggaggatgctgagaactttatctccaatatccgggtgaccgtggtgaagctgaagggcagcgacaacacattcgagtgccagtttgacgatgagtctgccaccgtggtggatttcctgaggcggtggatcgctttttcccagagcatcatctccacaagccctca

SEQ ID NO: 158 - DNA, 663 bp, Artificial Sequence
  Synthetic
ggatgcaaaccctgtatctgtaccgtgcccgaggtctcttccgtctttattttcccccccaagcctaaggatgtgctgatgattactctgacccccaaggtgacatgcgtggtggtggacatcagcaaggacgatcctgaggtgcagttctcttggtttgtggacgatgtggaggtgcacaccgcccagacacagccaagggaggagcagttcaatagcacctttcggtccgtgagcgagctgcccatcatgcatcaggattggctgaatggcaaggagttcaagtgcagagtgaactctgccgcttttcccgctcctatcgagaagaccatctccaagacaaagggccgcccaaaggctccacaggtgtacaccatcccacctccaaaggagcagatggctaaggacaaggtgtctctgacctgtatgatcacagacttctttcctgaggacatcacagtggagtggcagtggaacggccagcctgccgagaactataagaatacccagccaatcatggacacagatggctcttacttcgtgtattccaagctgaacgtgcagaagtccaattgggaggctggcaacacctttacatgtagcgtgctgcacgaaggtctgcataaccatcataccgaaaaatcactgtcacactcccctgga

SEQ ID NO: 159 - DNA, 666 bp, Artificial Sequence
  Synthetic
ggatgcaaaccctgtatctgtaccgtgcccgaggtctcttccgtctttattttcccccccaagcctaaggatgtgctgactattactctgacccccaaggtgacatgcgtggtggtggacatcagcaaggacgatcctgaggtgcagttctcttggtttgtggacgatgtggaggtgcacaccgcccagacacagccaagggaggagcagttcaatagcacctttcggtccgtgagcgagctgcccatcatgcatcaggattggctgaatggcaaggagttcaagtgcagagtgaactctgccgcttttcccgctcctatcgagaagaccatctccaagacaaagggccgcccaaaggctccacaggtgtacaccatcccacctccaaaggagcagatggctaaggacaaggtgtctctgacctgtatgatcacagacttctttcctgaggacatcacagtggagtggcagtggaacggccagcctgccgagaactataagaatacccagccaatcatggacacagatggctcttacttcgtgtattccaagctgaacgtgcagaagtccaattgggaggctggcaacacctttacatgtagcgtgctgcacgaaggtctgcataaccatcataccgaaaaatcactgtcacactcccctggaaaa

SEQ ID NO: 160 - DNA, 399 bp, Artificial Sequence
  Synthetic
gctcctacatcctccagcaccaagaaaacccagctgcagttggagcatctgctgctggacctgcagatgatcctgaacggcatcaacaactacaagaaccccaagctgacccggatgctgaccttcaagttctacatgcccaagaaggccaccgagctgaaacatctgcagtgcctggaagaggaactgaagcccctggaagaagtgctgaatctggcccagtccaagaacttccacctgaggcctcgggacctgatctccaacatcaacgtgatcgtgctcgagctgaagggctccgagacaaccttcatgtgcgagtacgccgacgagacagctaccatcgtggaatttctgaaccggtggatcaccttcagccagtccatcatcagcaccctgaca

SEQ ID NO: 161 - DNA, 678 bp, Artificial Sequence
  Synthetic
gacaagacccacacctgtcctccatgtcctgctccagaattgctcggcggaccctccgtgttcctgtttcctccaaagcctaaggacaccctgatgatctctcggacccctgaagtgacctgcgtggtggtcgatgtgtctcacgaggatcccgaagtgaagttcaattggtacgtggacggcgtggaagtgcacaacgccaagaccaagcctagagaggaacagtacaactccacctacagagtggtgtccgtgctgaccgtgctgcaccaggattggctgaatggcaaagagtacaagtgcaaggtgtccaacaaggccctgcctgctcctatcgaaaagaccatctccaaggccaagggccagcctagggaaccccaggtttacaccttgcctccatctcgggacgagctgaccaagaaccaggtgtccctgacctgtctggtcaagggcttctacccctccgatatcgccgtggaatgggagtctaatggccagcctgaaaacaattacaagacaacccctcctgtgctggactccgacggctcattcttcctgtacagcaagctgacagtggacaagtccagatggcagcagggcaacgtgttctcctgctccgtgatgcatgaggccctgcacaaccactacacccagaagtccctgtctctgtcccctggc

SEQ ID NO: 162 - DNA, 399 bp, Artificial Sequence
  Synthetic
gcacctacttcaagttctacaaagaaaacacagctacaactggagcatttacttctggatttacagatgattttgaatggaattaataattacaagaatcccaaactcaccaggatgctcacatttaagttttacatgcccaagaaggccacagaactgaaacatcttcagtgtctagaagaagaactcaaacctctggaggaagtgctaaatttagctcaaagcaaaaactttcacttaagacccagggacttaatcagcaatatcaacgtaatagttctggaactaaagggatctgaaacaacattcatgtgtgaatatgctgatgagacagcaaccattgtagaatttctgaacagatggattaccttttgtcaaagcatcatctcaacactgact

SEQ ID NO: 163 - DNA, 678 bp, Artificial Sequence
  Synthetic
gacaaaactcacacatgcccaccgtgcccagcacctgaactcctggggggaccgtcagtcttcctcttccccccaaaacccaaggacaccctcatgatctcccggacccctgaggtcacatgcgtggtggtggacgtgagccacgaagaccctgaggtcaagttcaactggtacgtggacggcgtggaggtgcataatgccaagacaaagccgcgggaggagcagtacaacagcacgtaccgtgtggtcagcgtcctcaccgtcctgcaccaggactggctgaatggcaaggagtacaagtgcaaggtctccaacaaagccctcccagcccccatcgagaaaaccatctccaaagccaaagggcagccccgagaaccacaggtgtacaccctgcccccatcccgggatgagctgaccaagaaccaggtcagcctgacctgcctggtcaaaggcttctatcccagcgacatcgccgtggagtgggagagcaatgggcagccggagaacaactacgacaccacgcctcccgtgctggactccgacggctccttcttcctctatagcgacctcaccgtggacaagagcaggtggcagcaggggaacgtcttctcatgctccgtgatgcatgaggctctgcacaaccactacacgcagaagagcctctccctgtctccgggt

SEQ ID NO: 164 - DNA, 657 bp, Artificial Sequence
  Synthetic
gagctctgtgacgatgacccgccagagatcccacacgccacattcaaagccatggcctacaaggaaggaaccatgttgaactgtgaatgcaagagaggtttccgcagaataaaaagcgggtcactctatatgctctgtacaggaaactctagccactcgtcctgggacaaccaatgtcaatgcacaagctctgccactcggaacacaacgaaacaagtgacacctcaacctgaagaacagaaagaaaggaaaaccacagaaatgcaaagtccaatgcagccagtggaccaagcgagccttccaggtcactgcagggaacctccaccatgggaaaatgaagccacagagagaatttatcatttcgtggtggggcagatggtttattatcagtgcgtccagggatacagggctctacacagaggtcctgctgagagcgtctgcaaaatgacccacgggaagacaaggtggacccagccccagctcatatgcacaggtgaaatggagaccagtcagtttccaggtgaagagaagcctcaggcaagccccgaaggccgtcctgagagtgagacttcctgcctcgtcacaacaacagattttcaaatacagacagaaatggctgcaaccatggagacgtccatatttacaacagagtaccag

SEQ ID NO: 165 - DNA, 30 bp, Artificial Sequence
  Synthetic
tctggtggcggtggctctggtggcggtggc

SEQ ID NO: 166 - DNA, 21 bp, Artificial Sequence
  Synthetic
ggtcctctgggtgtcagaggt

SEQ ID NO: 167-179 - skipped (13 entries)

SEQ ID NO: 180 - protein, 7 aa, Artificial Sequence
  Synthetic
  misc_feature (1)..(7): "TLTYTWS" may or may not repeat indefinitely
TLTYTWS

SEQ ID NO: 181 - protein, 5 aa, Artificial Sequence
  Synthetic
  misc_feature (1)..(5): "CREKA" may or may not repeat indefinitely
CREKA

SEQ ID NO: 182 - protein, 3 aa, Artificial Sequence
  Synthetic
  misc_feature (1)..(3): "GXY" may or may not repeat indefinitely
  misc_feature (2)..(3): Xaa is Proline or modified Proline
GXX

SEQ ID NO: 183 - protein, 40 aa, Artificial Sequence
  Synthetic
GHCVTDSGVVYSVGMQWLKTQGNKQMLCTCLGNGVSCQET

SEQ ID NO: 184 - protein, 44 aa, Artificial Sequence
  Synthetic
EICTTNEGVMYRIGDQWDKQHDMGHMMRCTCVGNGRGEWTCIAY

SEQ ID NO: 185 - protein, 43 aa, Artificial Sequence
  Synthetic
DQCIVDDITYNVNDTFHKRHEEGHMLNCTCFGQGRGRWKCDPV

SEQ ID NO: 186 - protein, 44 aa, Artificial Sequence
  Synthetic
DQCQDSETGTFYQIGDSWEKYVHGVRYQCYCYGRGIGEWHCQPL

SEQ ID NO: 187 - protein, 49 aa, Artificial Sequence
  Synthetic
SNGEPCVLPFTYNGRTFYSCTTEGRQDGHLWCSTTSNYEQDQKYSFCTD

SEQ ID NO: 188 - protein, 49 aa, Artificial Sequence
  Synthetic
SNGALCHFPFLYNNHNYTDCTSEGRRDNMKWCGTTQNYDADQKFGFCPM

SEQ ID NO: 189 - protein, 20 aa, Artificial Sequence
  Synthetic
RRANAALKAGELYKSILYGC

SEQ ID NO: 190 - protein, 20 aa, Artificial Sequence
  Synthetic
RRANAALKAGELYKCILYGC

SEQ ID NO: 191 - protein, 26 aa, Artificial Sequence
  Synthetic
MIVIELGTNPLKSSGIENGAFQGMKK

SEQ ID NO: 192 - protein, 9 aa, Artificial Sequence
  Synthetic
LRELHLNNN

SEQ ID NO: 193 - protein, 10 aa, Artificial Sequence
  Synthetic
WREPSFCALS

SEQ ID NO: 194 - protein, 7 aa, Artificial Sequence
  Synthetic
TKKTLRT

SEQ ID NO: 195 - protein, 13 aa, Artificial Sequence
  Synthetic
CPKESCNLFVLKD

SEQ ID NO: 196 - protein, 10 aa, Artificial Sequence
  Synthetic
WREPSFCALS

SEQ ID NO: 197 - protein, 11 aa, Artificial Sequence
  Synthetic
HVWMQAPGGGK

SEQ ID NO: 198 - protein, 11 aa, Artificial Sequence
  Synthetic
HVWMQAPGGGC

SEQ ID NO: 199 - protein, 6 aa, Artificial Sequence
  Synthetic
WYRGRL

SEQ ID NO: 200 - protein, 7 aa, Artificial Sequence
  Synthetic
KLWVLPK

SEQ ID NO: 201 - protein, 18 aa, Artificial Sequence
  Synthetic
RRANAALKAGELYKSILY

SEQ ID NO: 202 - protein, 9 aa, Artificial Sequence
  Synthetic
GELYKSILY

SEQ ID NO: 203 - protein, 18 aa, Artificial Sequence
  Synthetic
RRANAALKAGELYKCILY

SEQ ID NO: 204 - protein, 9 aa, Artificial Sequence
  Synthetic
GELYKCILY

SEQ ID NO: 205 - protein, 9 aa, Artificial Sequence
  Synthetic
RLDGNEIKR

SEQ ID NO: 206 - protein, 13 aa, Artificial Sequence
  Synthetic
AHEEISTTNEGVM

SEQ ID NO: 207 - protein, 28 aa, Artificial Sequence
  Synthetic
NGVFKYRPRYFLYKHAYFYPPLKRFPVQ

SEQ ID NO: 208 - protein, 10 aa, Artificial Sequence
  Synthetic
CQDSETRTFY

SEQ ID NO: 209 - protein, 7 aa, Artificial Sequence
  Synthetic
TKKTLRT

SEQ ID NO: 210 - protein, 28 aa, Artificial Sequence
  Synthetic
GLRSKSKKFRRPDIQYPDATDEDITSHM

SEQ ID NO: 211 - protein, 7 aa, Artificial Sequence
  Synthetic
SQNPVQP

SEQ ID NO: 212 - protein, 11 aa, Artificial Sequence
  Synthetic
SYIRIADTNIT

SEQ ID NO: 213 - protein, 8 aa, Artificial Sequence
  Synthetic
KELNLVYT

SEQ ID NO: 214 - protein, 4 aa, Artificial Sequence
  Synthetic
GSIT

SEQ ID NO: 215 - protein, 12 aa, Artificial Sequence
  Synthetic
GSITTIDVPWNV

SEQ ID NO: 216 - protein, 9 aa, Artificial Sequence
  Synthetic
GQLYKSILY

SEQ ID NO: 217 - protein, 18 aa, Artificial Sequence
  Synthetic
RRANAALKAGQLYKSILY

SEQ ID NO: 218 - protein, 10 aa, Artificial Sequence
  Synthetic
WREPSFCALS

SEQ ID NO: 219 - protein, 14 aa, Artificial Sequence
  Synthetic
WHCTTKFPHHYCLY

SEQ ID NO: 220 - protein, 16 aa, Artificial Sequence
  Synthetic
AHKCPWHLYTTHYCFT

SEQ ID NO: 221 - protein, 16 aa, Artificial Sequence
  Synthetic
PAHKCPWHLYTHYCFT

SEQ ID NO: 222 - protein, 6 aa, Artificial Sequence
  Synthetic
  misc_feature (3)..(3): Xaa is 4-hydroxyproline
GRXGER

SEQ ID NO: 223 - protein, 6 aa, Artificial Sequence
  Synthetic
  misc_feature (3)..(3): Xaa is 4-hydroxyproline
GMXGER

SEQ ID NO: 224 - protein, 6 aa, Artificial Sequence
  Synthetic
  misc_feature (3)..(3): Xaa is 4-hydroxyproline
GLXGEN

SEQ ID NO: 225 - protein, 6 aa, Artificial Sequence
  Synthetic
  misc_feature (3)..(3): Xaa is 4-hydroxyproline
GLXGER

SEQ ID NO: 226 - protein, 6 aa, Artificial Sequence
  Synthetic
GLKGEN

SEQ ID NO: 227 - protein, 15 aa, Artificial Sequence
  Synthetic
  misc_feature (3)..(3): Xaa is 4-hydroxyproline
  misc_feature (12)..(12): Xaa is 4-hydroxyproline
GFXGERGVEGPXGPA

SEQ ID NO: 228 - protein, 10 aa, Artificial Sequence
  Synthetic
WREPSFCALS

SEQ ID NO: 229 - protein, 6 aa, Artificial Sequence
  Synthetic
WYRGRL

SEQ ID NO: 230 - protein, 12 aa, Artificial Sequence
  Synthetic
WTCSGDEYTWHC

SEQ ID NO: 231 - protein, 12 aa, Artificial Sequence
  Synthetic
WTCVGDHKTWKC

SEQ ID NO: 232 - protein, 16 aa, Artificial Sequence
  Synthetic
QWHCTTRFPHHYCLYG

SEQ ID NO: 233 - protein, 17 aa, Artificial Sequence
  Synthetic
STWTWNGSAWTWNEGGK

SEQ ID NO: 234 - protein, 17 aa, Artificial Sequence
  Synthetic
STWTWNGTNWTRNDGGK

SEQ ID NO: 235 - protein, 8 aa, Artificial Sequence
  Synthetic
CVWLWEQC

SEQ ID NO: 236 - protein, 8 aa, Artificial Sequence
  Synthetic
CMTSPWRC

SEQ ID NO: 237 - protein, 18 aa, Artificial Sequence
  Synthetic
CPGRVMHGLHLGDDEGPC

SEQ ID NO: 238 - protein, 7 aa, Artificial Sequence
  Synthetic
KLWLLPK

SEQ ID NO: 239 - protein, 10 aa, Artificial Sequence
  Synthetic
CQDSETRTFY

SEQ ID NO: 240 - protein, 9 aa, Artificial Sequence
  Synthetic
LSELRLHEN

SEQ ID NO: 241 - protein, 9 aa, Artificial Sequence
  Synthetic
LTELHLDNN

SEQ ID NO: 242 - protein, 9 aa, Artificial Sequence
  Synthetic
LSELRLHNN

SEQ ID NO: 243 - protein, 9 aa, Artificial Sequence
  Synthetic
LSELRLHAN

SEQ ID NO: 244 - protein, 9 aa, Artificial Sequence
  Synthetic
LRELHLNNN

SEQ ID NO: 245 - protein, 12 aa, Artificial Sequence
  Synthetic
RVMHGLHLGDDE

SEQ ID NO: 246 - protein, 12 aa, Artificial Sequence
  Synthetic
RVMHGLHLGNNQ

SEQ ID NO: 247 - protein, 12 aa, Artificial Sequence
  Synthetic
RVMHGLHLGNNQ

SEQ ID NO: 248 - protein, 12 aa, Artificial Sequence
  Synthetic
  misc_feature: surrounds K2K, a trilysine branched core
GQLYKSILYGSG

SEQ ID NO: 249 - protein, 11 aa, Artificial Sequence
  Synthetic
GSGQLYKSILY

SEQ ID NO: 250 - protein, 12 aa, Artificial Sequence
  Synthetic
GSGGQLYKSILY

SEQ ID NO: 251 - protein, 8 aa, Artificial Sequence
  Synthetic
KQLNLVYT

SEQ ID NO: 252 - protein, 8 aa, Artificial Sequence
  Synthetic
CVWLWQQC

SEQ ID NO: 253 - protein, 10 aa, Artificial Sequence
  Synthetic
WREPSFSALS

SEQ ID NO: 254 - protein, 28 aa, Artificial Sequence
  Synthetic
GHRPLDKKREEAPSLRPAPPPISGGGYR

SEQ ID NO: 255 - protein, 28 aa, Artificial Sequence
  Synthetic
GHRPLNKKRQQAPSLRPAPPPISGGGYR

SEQ ID NO: 256 - protein, 12 aa, Artificial Sequence
  Synthetic
GELYKSILYGSG

SEQ ID NO: 257 - protein, 12 aa, Artificial Sequence
  Synthetic
GQLYKSILYGSG

SEQ ID NO: 258 - protein, 13 aa, Artificial Sequence
  Synthetic
RYPISRPRKRGSG

SEQ ID NO: 259 - protein, 11 aa, Artificial Sequence
  Synthetic
GELYKSILYGC

SEQ ID NO: 260 - protein, 11 aa, Artificial Sequence
  Synthetic
RLDGNEIKRGC

SEQ ID NO: 261 - protein, 15 aa, Artificial Sequence
  Synthetic
AHEEISTTNEGVMGC

SEQ ID NO: 262 - protein, 12 aa, Artificial Sequence
  Synthetic
GCGGELYKSILY

SEQ ID NO: 263 - protein, 30 aa, Artificial Sequence
  Synthetic
NGVFKYRPRYFLYKHAYFYPPLKRFPVQGC

SEQ ID NO: 264 - protein, 12 aa, Artificial Sequence
  Synthetic
CQDSETRTFYGC

SEQ ID NO: 265 - protein, 9 aa, Artificial Sequence
  Synthetic
TKKTLRTGC

SEQ ID NO: 266 - protein, 30 aa, Artificial Sequence
  Synthetic
GLRSKSKKFRRPDIQYPDATDEDITSHMGC

SEQ ID NO: 267 - protein, 9 aa, Artificial Sequence
  Synthetic
SQNPVQPGC

SEQ ID NO: 268 - protein, 13 aa, Artificial Sequence
  Synthetic
SYIRIADTNITGC

SEQ ID NO: 269 - protein, 10 aa, Artificial Sequence
  Synthetic
KELNLVYTGC

SEQ ID NO: 270 - protein, 14 aa, Artificial Sequence
  Synthetic
GSITTIDVPWNVGC

SEQ ID NO: 271 - protein, 14 aa, Artificial Sequence
  Synthetic
GCGGELYKSILYGC

SEQ ID NO: 272 - protein, 21 aa, Artificial Sequence
  Synthetic
RRANAALKAGELYKSILYGSG

SEQ ID NO: 273 - protein, 8 aa, Artificial Sequence
  Synthetic
  misc_feature: cyclic peptide
CVWLWENC

SEQ ID NO: 274 - protein, 8 aa, Artificial Sequence
  Synthetic
  misc_feature: cyclic peptide
CVWLWEQC

SEQ ID NO: 275 - protein, 12 aa, Artificial Sequence
  Synthetic
  misc_feature: D-amino acid
EDDGLHLGHMVR

SEQ ID NO: 276 - protein, 12 aa, Artificial Sequence
  Synthetic
  misc_feature: D-amino acid
QNNGLHLGHMVR

SEQ ID NO: 277 - protein, 93 aa, Artificial Sequence
  Synthetic
PPTDLRFTNIGPDTMRVTWAPPPSIDLTNFLVRYSPVKNEEDVAELSISPSDNAVVLTNLLPGTEYVVSVSSVYEQHESTPLRGRQKTGLDSP

SEQ ID NO: 278 - protein, 88 aa, Artificial Sequence
  Synthetic
TGIDFSDITANSFTVHWIAPRATITGYRIRHHPEHFSGRPREDRVPHSRNSITLTNLTPGTEYVVSIVALNGREESPLLIGQQSTVSD

SEQ ID NO: 279 - protein, 41 aa, Artificial Sequence
  Synthetic
PGCYDNGKHYQINQQWERTYLGNALVCTCYGGSRGFNCESK

SEQ ID NO: 280 - protein, 44 aa, Artificial Sequence
  Synthetic
ETCFDKYTGNTYRVGDTYERPKDSMIWDCTCIGAGRGRISCTIA

SEQ ID NO: 281 - protein, 44 aa, Artificial Sequence
  Synthetic
NRCHEGGQSYKIGDTWRRPHETGGYMLECVCLGNGKGEWTCKPI

SEQ ID NO: 282 - protein, 45 aa, Artificial Sequence
  Synthetic
EKCFDHAAGTSYVVGETWEKPYQGWMMVDCTCLGEGSGRITCTSR

SEQ ID NO: 283 - protein, 45 aa, Artificial Sequence
  Synthetic
NRCNDQDTRTSYRIGDTWSKKDNRGNLLQCICTGNGRGEWKCERH

SEQ ID NO: 284 - protein, 40 aa, Artificial Sequence; identical to SEQ ID NO: 183
  Synthetic

SEQ ID NO: 285 - protein, 44 aa, Artificial Sequence; identical to SEQ ID NO: 184
  Synthetic

SEQ ID NO: 286 - protein, 43 aa, Artificial Sequence; identical to SEQ ID NO: 185
  Synthetic

SEQ ID NO: 287 - protein, 44 aa, Artificial Sequence; identical to SEQ ID NO: 186
  Synthetic

SEQ ID NO: 288 - protein, 94 aa, Artificial Sequence
  Synthetic
APTDLKFTQVTPTSLSAQWTPPNVQLTGYRVRVTPKEKTGPMKEINLAPDSSSVVVSGLMVATKYEVSVYALKDTLTSRPAQGVVTTLENVSPP

SEQ ID NO: 289 - protein, 90 aa, Artificial Sequence
  Synthetic
APTNLQFVNETDSTVLVRWTPPRAQITGYRLTVGLTRRGQPRQYNVGPSVSKYPLRNLQPASEYTVSLVAIKGNQESPKATGVFTTLQPG

SEQ ID NO: 290 - protein, 6 aa, Artificial Sequence
  Synthetic
KGHRGF

SEQ ID NO: 291 - protein, 6 aa, Artificial Sequence
  Synthetic
GFPGER

SEQ ID NO: 292 - protein, 15 aa, Artificial Sequence
  Synthetic
GTPGPQGIAGQRDVV

SEQ ID NO: 293 - protein, 5 aa, Artificial Sequence
  Synthetic
EKGPD

SEQ ID NO: 294 - protein, 6 aa, Artificial Sequence
  Synthetic
EKGPDP

SEQ ID NO: 295 - protein, 7 aa, Artificial Sequence
  Synthetic
EKGPDPL

SEQ ID NO: 296 - protein, 12 aa, Artificial Sequence
  Synthetic
TAGSCLRKFSTM

SEQ ID NO: 297 - protein, 15 aa, Artificial Sequence
  Synthetic
TAIPSCPEGTVPLYS

SEQ ID NO: 298 - protein, 15 aa, Artificial Sequence
  Synthetic
TDIPPCPHGWISLWK

SEQ ID NO: 299 - protein, 5 aa, Artificial Sequence
  Synthetic
PHSRN

SEQ ID NO: 300 - protein, 3 aa, Artificial Sequence
  Synthetic
RGD

SEQ ID NO: 301 - protein, 6 aa, Artificial Sequence
  Synthetic
GRGDSP

SEQ ID NO: 302 - protein, 16 aa, Artificial Sequence
  Synthetic
YRVRVTPKEKTGPMKE

SEQ ID NO: 303 - protein, 9 aa, Artificial Sequence
  Synthetic
SPPRRARVT

SEQ ID NO: 304 - protein, 8 aa, Artificial Sequence
  Synthetic
WQPPRARI

SEQ ID NO: 305 - protein, 15 aa, Artificial Sequence
  Synthetic
KNNQKSEPLIGRKKT

SEQ ID NO: 306 - protein, 8 aa, Artificial Sequence
  Synthetic
EILDVPST

SEQ ID NO: 307 - protein, 4 aa, Artificial Sequence
  Synthetic
REDV

SEQ ID NO: 308 - protein, 13 aa, Artificial Sequence
  Synthetic
RQVFQVAYIIIKA

SEQ ID NO: 309 - protein, 12 aa, Artificial Sequence
  Synthetic
SINNTAVMQRLT

SEQ ID NO: 310 - protein, 5 aa, Artificial Sequence
  Synthetic
IKVAV

SEQ ID NO: 311 - protein, 12 aa, Artificial Sequence
  Synthetic
NRWHSIYITRFG

SEQ ID NO: 312 - protein, 12 aa, Artificial Sequence
  Synthetic
TWYKIAFQRNRK

SEQ ID NO: 313 - protein, 12 aa, Artificial Sequence
  Synthetic
RKRLQVQLSIRT

SEQ ID NO: 314 - protein, 12 aa, Artificial Sequence
  Synthetic
KNRLTIELEVRT

SEQ ID NO: 315 - protein, 12 aa, Artificial Sequence
  Synthetic
SYWYRIEASRTG

SEQ ID NO: 316 - protein, 19 aa, Artificial Sequence
  Synthetic
DFGTVQLRNGFPFFSYDLG

SEQ ID NO: 317 - protein, 13 aa, Artificial Sequence
  Synthetic
GQLFHVAYILIKF

SEQ ID NO: 318 - protein, 12 aa, Artificial Sequence
  Synthetic
KNSFMALYLSKG

SEQ ID NO: 319 - protein, 12 aa, Artificial Sequence
  Synthetic
TLFLAHGRLVFM

SEQ ID NO: 320 - protein, 13 aa, Artificial Sequence
  Synthetic
GQVFHVAYVLIKF

SEQ ID NO: 321 - protein, 6 aa, Artificial Sequence
  Synthetic
GIIFFL

SEQ ID NO: 322 - protein, 12 aa, Artificial Sequence
  Synthetic
LALFLSNGHFVA

SEQ ID NO: 323 - protein, 7 aa, Artificial Sequence
  Synthetic
RYVVLPR

SEQ ID NO: 324 - protein, 5 aa, Artificial Sequence
  Synthetic
PDSGR

SEQ ID NO: 325 - protein, 5 aa, Artificial Sequence
  Synthetic
YIGSR

SEQ ID NO: 326 - protein, 12 aa, Artificial Sequence
  Synthetic
KAFDITYVRLKF

SEQ ID NO: 327 - protein, 10 aa, Artificial Sequence
  Synthetic
RNIAEIIKDI

SEQ ID NO: 328 - protein, 9 aa, Artificial Sequence
  Synthetic
FRHRNRKGY

SEQ ID NO: 329 - protein, 16 aa, Artificial Sequence
  Synthetic
KKQRFRHRNRKGYRSQ

SEQ ID NO: 330 - protein, 7 aa, Artificial Sequence
  Synthetic
FHRRIKA

SEQ ID NO: 331 - protein, 4 aa, Artificial Sequence
  Synthetic
KRSR

SEQ ID NO: 332 - protein, 6 aa, Artificial Sequence
  Synthetic
GLPGER

SEQ ID NO: 333 - protein, 6 aa, Artificial Sequence
  Synthetic
GFPGER

SEQ ID NO: 334 - protein, 6 aa, Artificial Sequence
  Synthetic
GLSGER

SEQ ID NO: 335 - protein, 4 aa, Artificial Sequence
  Synthetic
DGEA

SEQ ID NO: 336 - protein, 13 aa, Artificial Sequence
  Synthetic
GPAGKDGEAGAQG

SEQ ID NO: 337 - protein, 12 aa, Artificial Sequence
  Synthetic
GPKGAAGEPGKP

SEQ ID NO: 338 - protein, 12 aa, Artificial Sequence
  Synthetic
GAPGPKGARGSA

SEQ ID NO: 339 - protein, 15 aa, Artificial Sequence
  Synthetic
GPQGIAGQRGVVGLP

SEQ ID NO: 340 - protein, 9 aa, Artificial Sequence
  Synthetic
PKGQKGEKG

SEQ ID NO: 341 - protein, 6 aa, Artificial Sequence
  Synthetic
GASGER

SEQ ID NO: 342 - protein, 6 aa, Artificial Sequence
  Synthetic
GQRGER

SEQ ID NO: 343 - protein, 6 aa, Artificial Sequence
  Synthetic
GMPGER

SEQ ID NO: 344 - protein, 9 aa, Artificial Sequence
  Synthetic
RGQPGVMGF

SEQ ID NO: 345 - protein, 6 aa, Artificial Sequence
  Synthetic
GKDGES

SEQ ID NO: 346 - protein, 6 aa, Artificial Sequence
  Synthetic
GLKGEN

SEQ ID NO: 347 - protein, 6 aa, Artificial Sequence
  Synthetic
GLPGEN

SEQ ID NO: 348 - protein, 6 aa, Artificial Sequence
  Synthetic
GLPGEA

SEQ ID NO: 349 - protein, 12 aa, Artificial Sequence
  Synthetic
GPPGDQGPPGIP

SEQ ID NO: 350 - protein, 12 aa, Artificial Sequence
  Synthetic
GAKGRAGFPGLP

SEQ ID NO: 351 - protein, 16 aa, Artificial Sequence
  Synthetic
MFKKPTPSTLKAGELR

SEQ ID NO: 352 - protein, 12 aa, Artificial Sequence
  Synthetic
GFPGSRGDTGPP

SEQ ID NO: 353 - protein, 15 aa, Artificial Sequence
  Synthetic
GVKGDKGNPGWPGAP

SEQ ID NO: 354 - protein, 6 aa, Artificial Sequence
  Synthetic
FYFDLR

SEQ ID NO: 355 - protein, 16 aa, Artificial Sequence
  Synthetic
MFKKPTPSTLKAGELR

SEQ ID NO: 356 - protein, 12 aa, Artificial Sequence
  Synthetic
GFPGSRGDTGPP

SEQ ID NO: 357 - protein, 15 aa, Artificial Sequence
  Synthetic
GVKGDKGNPGWPGAP

SEQ ID NO: 358 - protein, 6 aa, Artificial Sequence
  Synthetic
FYFDLR

SEQ ID NO: 359 - protein, 15 aa, Artificial Sequence
  Synthetic
RGQPGVPGVPGMKGD

SEQ ID NO: 360 - protein, 15 aa, Artificial Sequence
  Synthetic
TDIPPCPHGWISLWK

SEQ ID NO: 361 - protein, 7 aa, Artificial Sequence
  Synthetic
MNYYSNS

SEQ ID NO: 362 - protein, 19 aa, Artificial Sequence
  Synthetic
CNYYSNSYSFWLASLNPER

SEQ ID NO: 363 - protein, 12 aa, Artificial Sequence
  Synthetic
ISRCQVCMKKRH

SEQ ID NO: 364 - protein, 12 aa, Artificial Sequence
  Synthetic
TLGSCLQRFTTM

SEQ ID NO: 365 - protein, 6 aa, Artificial Sequence
  Synthetic
GRRGKT

SEQ ID NO: 366 - protein, 9 aa, Artificial Sequence
  Synthetic
RGQPGRKGL

SEQ ID NO: 367 - protein, 12 aa, Artificial Sequence
  Synthetic
MFRKPIPSTVKA

SEQ ID NO: 368 - protein, 13 aa, Artificial Sequence
  Synthetic
IISRCQVCMKMRP

SEQ ID NO: 369 - protein, 12 aa, Artificial Sequence
  Synthetic
LAGSCLPVFSTL

SEQ ID NO: 370 - protein, 12 aa, Artificial Sequence
  Synthetic
TAGSCLRRFSTM

SEQ ID NO: 371 - protein, 6 aa, Artificial Sequence
  Synthetic
NKRAHG

SEQ ID NO: 372 - protein, 20 aa, Artificial Sequence
  Synthetic
WTPPRAQITGYRLTVGLTRR

SEQ ID NO: 373 - protein, 6 aa, Artificial Sequence
  Synthetic
KLDAPT

SEQ ID NO: 374 - protein, 5 aa, Artificial Sequence
  Synthetic
PHSRN

SEQ ID NO: 375 - protein, 3 aa, Artificial Sequence
  Synthetic
RGD

SEQ ID NO: 376 - protein, 4 aa, Artificial Sequence
  Synthetic
RGDS

SEQ ID NO: 377 - protein, 6 aa, Artificial Sequence
  Synthetic
GRGDSP

SEQ ID NO: 378 - protein, 7 aa, Artificial Sequence
  Synthetic
EDGIHEL

SEQ ID NO: 379 - protein, 30 aa, Artificial Sequence
  Synthetic
PRARITGYIIKYEKPGSPPREVVPRPRPGV

SEQ ID NO: 380 - protein, 5 aa, Artificial Sequence
  Synthetic
IDAPS

SEQ ID NO: 381 - protein, 15 aa, Artificial Sequence
  Synthetic
VVIDASTAIDAPSNL

SEQ ID NO: 382 - protein, 5 aa, Artificial Sequence
  Synthetic
LDVPS

SEQ ID NO: 383 - protein, 4 aa, Artificial Sequence
  Synthetic
REDV

SEQ ID NO: 384 - protein, 10 aa, Artificial Sequence
  Synthetic
PHSRNRGDSP

SEQ ID NO: 385 - protein, 10 aa, Artificial Sequence
  Synthetic
PLDREAIAKY

SEQ ID NO: 386 - protein, 5 aa, Artificial Sequence
  Synthetic
HAVDI

SEQ ID NO: 387 - protein, 10 aa, Artificial Sequence
  Synthetic
LFSHAVSSNG

SEQ ID NO: 388 - protein, 6 aa, Artificial Sequence
  Synthetic
ADTPPV

SEQ ID NO: 389 - protein, 10 aa, Artificial Sequence
  Synthetic
QGADTPPVGV

SEQ ID NO: 390 - protein, 10 aa, Artificial Sequence
  Synthetic
PLDREAIAKY

SEQ ID NO: 391 - protein, 5 aa, Artificial Sequence
  Synthetic
DQNDN

SEQ ID NO: 392 - protein, 5 aa, Artificial Sequence
  Synthetic
HAVDI

SEQ ID NO: 393 - protein, 10 aa, Artificial Sequence
  Synthetic
LRAHAVDING

SEQ ID NO: 394 - protein, 10 aa, Artificial Sequence
  Synthetic
LRAHAVDVNG

SEQ ID NO: 395 - protein, 10 aa, Artificial Sequence
  Synthetic
VITVKDINDN

SEQ ID NO: 396 - protein, 10 aa, Artificial Sequence
  Synthetic
GLDRESYPYY

SEQ ID NO: 397 - protein, 10 aa, Artificial Sequence
  Synthetic
MKVSATDADD

SEQ ID NO: 398 - protein, 10 aa, Artificial Sequence
  Synthetic
QDPELPDKNM

SEQ ID NO: 399 - protein, 10 aa, Artificial Sequence
  Synthetic
LVVQAADLQG

SEQ ID NO: 400 - protein, 10 aa, Artificial Sequence
  Synthetic
NDDGGQFVVT

SEQ ID NO: 401 - protein, 10 aa, Artificial Sequence
  Synthetic
LVVQAADLQG

SEQ ID NO: 402 - protein, 10 aa, Artificial Sequence
  Synthetic
TYRIWRDTAN

SEQ ID NO: 403 - protein, 10 aa, Artificial Sequence
  Synthetic
YILHVAVTNY

SEQ ID NO: 404 - protein, 10 aa, Artificial Sequence
  Synthetic
YTALIIATDN

SEQ ID NO: 405 - protein, 10 aa, Artificial Sequence
  Synthetic
QDPELPDKNM

SEQ ID NO: 406 - protein, 4 aa, Artificial Sequence
  Synthetic
RGDV

SEQ ID NO: 407 - protein, 12 aa, Artificial Sequence
  Synthetic
PQVTRGDVFTMP

SEQ ID NO: 408 - protein, 10 aa, Artificial Sequence
  Synthetic
LNRQELFPFG

SEQ ID NO: 409 - protein, 11 aa, Artificial Sequence
  Synthetic
SIGFRGDGQTC

SEQ ID NO: 410 - protein, 17 aa, Artificial Sequence
  Synthetic
TWSKVGGHLRPGIVQSG

SEQ ID NO: 411 - protein, 9 aa, Artificial Sequence
  Synthetic
VAEIDGIEL

SEQ ID NO: 412 - protein, 8 aa, Artificial Sequence
  Synthetic
VFDNFVLK

SEQ ID NO: 413 - protein, 6 aa, Artificial Sequence
  Synthetic
VGVAPG

SEQ ID NO: 414 - protein, 5 aa, Artificial Sequence
  Synthetic
PGVGV

SEQ ID NO: 415 - protein, 10 aa, Artificial Sequence
  Synthetic
TTSWSQCSKS

SEQ ID NO: 416 - protein, 7 aa, Artificial Sequence
  Synthetic
SVVYGLR

SEQ ID NO: 417 - protein, 10 aa, Artificial Sequence
  Synthetic
DGRGDSVAYG

SEQ ID NO: 418 - protein, 10 aa, Artificial Sequence
  Synthetic
LALERKDHSG

SEQ ID NO: 419 - protein, 4 aa, Artificial Sequence
  Synthetic
RGDF

SEQ ID NO: 420 - protein, 7 aa, Artificial Sequence
  Synthetic
KRLDGSV

SEQ ID NO: 421 - protein, 12 aa, Artificial Sequence
  Synthetic
HHLGGAKQAGDV

SEQ ID NO: 422 - protein, 19 aa, Artificial Sequence
  Synthetic
YSMKKTTMKIIPFNRLTIG

SEQ ID NO: 423 - protein, 13 aa, Artificial Sequence
  Synthetic
GVYYQGGTYSKAS

SEQ ID NO: 424 - protein, 13 aa, Artificial Sequence
  Synthetic
LWVTVRSQQRGLF

SEQ ID NO: 425 - protein, 13 aa, Artificial Sequence
  Synthetic
GTNNWWQSPSIQN

SEQ ID NO: 426 - protein, 13 aa, Artificial Sequence
  Synthetic
WVTVTLDLRQVFQ

SEQ ID NO: 427 - protein, 13 aa, Artificial Sequence
  Synthetic
RQVFQVAYIIIKA

SEQ ID NO: 428 - protein, 14 aa, Artificial Sequence
  Synthetic
LTRYKITPRRGPPT

SEQ ID NO: 429 - protein, 12 aa, Artificial Sequence
  Synthetic
LLEFTSARYIRL

SEQ ID NO: 430 - protein, 12 aa, Artificial Sequence
  Synthetic
YIRLRLQRIRTL

SEQ ID NO: 431 - protein, 12 aa, Artificial Sequence
  Synthetic
RRYYYSIKDISV

SEQ ID NO: 432 - protein, 12 aa, Artificial Sequence
  Synthetic
GGFLKYTVSYDI

SEQ ID NO: 433 - protein, 12 aa, Artificial Sequence
  Synthetic
RDQLMTVLANVT

SEQ ID NO: 434 - protein, 12 aa, Artificial Sequence
  Synthetic
VLIKGGRARKHV

SEQ ID NO: 435 - protein, 12 aa, Artificial Sequence
  Synthetic
NLLLLLVKANLK

SEQ ID NO: 436 - protein, 12 aa, Artificial Sequence
  Synthetic
HRDELLLWARKI

SEQ ID NO: 437 - protein, 12 aa, Artificial Sequence
  Synthetic
KRRARDLVHRAE

SEQ ID NO: 438 - protein, 12 aa, Artificial Sequence
  Synthetic
SQFQESVDNITK

SEQ ID NO: 439 - protein, 12 aa, Artificial Sequence
  Synthetic
PGGMREKGRKAR

SEQ ID NO: 440 - protein, 12 aa, Artificial Sequence
  Synthetic
MEMQANLLLDRL

SEQ ID NO: 441 - protein, 12 aa, Artificial Sequence
  Synthetic
LSEIKLLISRAR

SEQ ID NO: 442 - protein, 5 aa, Artificial Sequence
  Synthetic
IKVAV

SEQ ID NO: 443 - protein, 12 aa, Artificial Sequence
  Synthetic
AASIKVAVSADR

SEQ ID NO: 444 - protein, 12 aa, Artificial Sequence
  Synthetic
NRWHSIYITRFG

SEQ ID NO: 445 - protein, 12 aa, Artificial Sequence
  Synthetic
SSFHFDGSGYAM

SEQ ID NO: 446 - protein, 6 aa, Artificial Sequence
  Synthetic
IAFQRN

SEQ ID NO: 447 - protein, 12 aa, Artificial Sequence
  Synthetic
TWYKIAFQRNRK

SEQ ID NO: 448 - protein, 12 aa, Artificial Sequence
  Synthetic
SLVRNRRVITIQ

SEQ ID NO: 449 - protein, 19 aa, Artificial Sequence
  Synthetic
DYATLQLQEGRLHFMFDLG

SEQ ID NO: 450 - protein, 12 aa, Artificial Sequence
  Synthetic
KKGSYNNIVVHV

SEQ ID NO: 451 - protein, 12 aa, Artificial Sequence
  Synthetic
ADNLLFYLGSAK

SEQ ID NO: 452 - protein, 12 aa, Artificial Sequence
  Synthetic
GSAKFIDFLAIE

SEQ ID NO: 453 - protein, 12 aa, Artificial Sequence
  Synthetic
KVSFLWWVGSGV

SEQ ID NO: 454 - protein, 12 aa, Artificial Sequence
  Synthetic
SYWYRIEASRTG

SEQ ID NO: 455 - protein, 12 aa, Artificial Sequence
  Synthetic
ISTVMFKFRTFS

SEQ ID NO: 456 - protein, 13 aa, Artificial Sequence
  Synthetic
KQANISIVDIDSN

SEQ ID NO: 457 - protein, 12 aa, Artificial Sequence
  Synthetic
FSTRNESGIILL

SEQ ID NO: 458 - protein, 12 aa, Artificial Sequence
  Synthetic
RRQTTQAYYAIF

SEQ ID NO: 459 - protein, 12 aa, Artificial Sequence
  Synthetic
YAIFLNKGRLEV

SEQ ID NO: 460 - protein, 12 aa, Artificial Sequence
  Synthetic
KNRLTIELEVRT

SEQ ID NO: 461 - protein, 12 aa, Artificial Sequence
  Synthetic
GLLFYMARINHA

SEQ ID NO: 462 - protein, 12 aa, Artificial Sequence
  Synthetic
VQLRNGFPYFSY

SEQ ID NO: 463 - protein, 12 aa, Artificial Sequence
  Synthetic
HKIKIVRVKQEG

SEQ ID NO: 464 - protein, 19 aa, Artificial Sequence
  Synthetic
DFGTVQLRNGFPFFSYDLG

SEQ ID NO: 465 - protein, 12 aa, Artificial Sequence
  Synthetic
YFDGTGFAKAVG

SEQ ID NO: 466 - protein, 12 aa, Artificial Sequence
  Synthetic
NGQWHKVTAKKI

SEQ ID NO: 467 - protein, 12 aa, Artificial Sequence
  Synthetic
AKKIKNRLELVV

SEQ ID NO: 468 - protein, 14 aa, Artificial Sequence
  Synthetic
GFPGGLNQFGLTTN

SEQ ID NO: 469 - protein, 13 aa, Artificial Sequence
  Synthetic
IRSLKLTKGTGKP

SEQ ID NO: 470 - protein, 13 aa, Artificial Sequence
  Synthetic
AKALELRGVQPVS

SEQ ID NO: 471 - protein, 13 aa, Artificial Sequence
  Synthetic
GQLFHVAYILIKF

SEQ ID NO: 472 - protein, 13 aa, Artificial Sequence
  Synthetic
SQRIYQFAKLNYT

SEQ ID NO: 473 - protein, 12 aa, Artificial Sequence
  Synthetic
NVLSLYNFKTTF

SEQ ID NO: 474 - protein, 12 aa, Artificial Sequence
  Synthetic
NAPFPKLSWTIQ

SEQ ID NO: 475 - protein, 12 aa, Artificial Sequence
  Synthetic
WTIQTTVDRGLL

SEQ ID NO: 476 - protein, 13 aa, Artificial Sequence
  Synthetic
DTINNGRDHMILI

SEQ ID NO: 477 - protein, 13 aa, Artificial Sequence
  Synthetic
MILISIGKSQKRM

SEQ ID NO: 478 - protein, 12 aa, Artificial Sequence
  Synthetic
PPFLMLLKGSTR

SEQ ID NO: 479 - protein, 13 aa, Artificial Sequence
  Synthetic
NQRLASFSNAQQS

SEQ ID NO: 480 - protein, 17 aa, Artificial Sequence
  Synthetic
ISNVFVQRMSQSPEVLD

SEQ ID NO: 481 - protein, 13 aa, Artificial Sequence
  Synthetic
KARSFNVNQLLQD

SEQ ID NO: 482 - protein, 12 aa, Artificial Sequence
  Synthetic
KNSFMALYLSKG

SEQ ID NO: 483 - protein, 19 aa, Artificial Sequence
  Synthetic
KNSFMALYLSKGRLVFALG

SEQ ID NO: 484 - protein, 19 aa, Artificial Sequence
  Synthetic
RDSFVALYLSEGHVIFALG

SEQ ID NO: 485 - protein, 12 aa, Artificial Sequence
  Synthetic
  misc_feature: MA3G70 source
KPRLQFSLDIQT

SEQ ID NO: 486 - protein, 12 aa, Artificial Sequence
  Synthetic
DGQWHSVTVSIK

SEQ ID NO: 487 - protein, 12 aa, Artificial Sequence
  Synthetic
FVLYLGSKNAKK

SEQ ID NO: 488 - protein, 12 aa, Artificial Sequence
  Synthetic
LAIKNDNLVYVY

SEQ ID NO: 489 - protein, 12 aa, Artificial Sequence
  Synthetic
AYFSIVKIERVG

SEQ ID NO: 490 - protein, 12 aa, Artificial Sequence
  Synthetic
DVISLYNFKHIY

SEQ ID NO: 491 - protein, 12 aa, Artificial Sequence
  Synthetic
FFDGSSYAVVRD

SEQ ID NO: 492 - protein, 12 aa, Artificial Sequence
  Synthetic
LHVFYDFGFSNG

SEQ ID NO: 493 - protein, 20 aa, Artificial Sequence
  Synthetic
LKKAQINDAKYREISIIYHN

SEQ ID NO: 494 - protein, 12 aa, Artificial Sequence
  Synthetic
RAYFNGQSFIAS

SEQ ID NO: 495 - protein, 12 aa, Artificial Sequence
  Synthetic
SRLRGKNPTKGK

SEQ ID NO: 496 - protein, 12 aa, Artificial Sequence
  Synthetic
LHKKGKNSSKPK

SEQ ID NO: 497 - protein, 12 aa, Artificial Sequence
  Synthetic
RLKTRSSHGMIF

SEQ ID NO: 498 - protein, 12 aa, Artificial Sequence
  Synthetic
GEKSQFSIRLKT

SEQ ID NO: 499 - protein, 12 aa, Artificial Sequence
  Synthetic
TLFLAHGRLVFM

SEQ ID NO: 500 - protein, 12 aa, Artificial Sequence
  Synthetic
LVFMFNVGHKKL

SEQ ID NO: 501 - protein, 20 aa, Artificial Sequence
  Synthetic
TLFLAHGRLVFMFNVGHKKL

SEQ ID NO: 502 - protein, 19 aa, Artificial Sequence
  Synthetic
DFMTLFLAHGRLVFMFNVG

SEQ ID NO: 503 - protein, 12 aa, Artificial Sequence
  Synthetic
HKKLKIRSQEKY

SEQ ID NO: 504 - protein, 12 aa, Artificial Sequence
  Synthetic
GAAWKIKGPIYL

SEQ ID NO: 505 - protein, 12 aa, Artificial Sequence
  Synthetic
VIRDSNVVQLDV

SEQ ID NO: 506 - protein, 13 aa, Artificial Sequence
  Synthetic
EVNVTLDLGQVFH

SEQ ID NO: 507 - protein, 13 aa, Artificial Sequence
  Synthetic
GQVFHVAYVLIKF

SEQ ID NO: 508 - protein, 15 aa, Artificial Sequence
  Synthetic
RDFTKATNIRLRFLR

SEQ ID NO: 509 - protein, 12 aa, Artificial Sequence
  Synthetic
NIRLRFLRTNTL

SEQ ID NO: 510 - protein, 12 aa, Artificial Sequence
  Synthetic
GKNTGDHFVLYM

SEQ ID NO: 511 - protein, 13 aa, Artificial Sequence
  Synthetic
VVSLYNFEQTFML

SEQ ID NO: 512 - protein, 12 aa, Artificial Sequence
  Synthetic
RFDQELRLVSYN

SEQ ID NO: 513 - protein, 12 aa, Artificial Sequence
  Synthetic
ASKAIQVFLLGG

SEQ ID NO: 514 - protein, 12 aa, Artificial Sequence
  Synthetic
TVFSVDQDNMLE

SEQ ID NO: 515 - protein, 12 aa, Artificial Sequence
  Synthetic
RLRGPQRVFDLH

SEQ ID NO: 516 - protein, 12 aa, Artificial Sequence
  Synthetic
SRATAQKVSRRS

SEQ ID NO: 517 - protein, 12 aa, Artificial Sequence
  Synthetic
GSLSSHLEFVGI

SEQ ID NO: 518 - protein, 12 aa, Artificial Sequence
  Synthetic
RNRLHLSMLVRP

SEQ ID NO: 519 - protein, 13 aa, Artificial Sequence
  Synthetic
APMSGRSPSLVLK

SEQ ID NO: 520 - protein, 12 aa, Artificial Sequence
  Synthetic
LALFLSNGHFVA

SEQ ID NO: 521 - protein, 12 aa, Artificial Sequence
  Synthetic
PGRWHKVSVRWE

SEQ ID NO: 522 - protein, 12 aa, Artificial Sequence
  Synthetic
VRWGMQQIQLVV

SEQ ID NO: 523 - protein, 12 aa, Artificial Sequence
  Synthetic
KMPYVSLELEMR

SEQ ID NO: 524 - protein, 12 aa, Artificial Sequence
  Synthetic
VLLQANDGAGEF

SEQ ID NO: 525 - protein, 12 aa, Artificial Sequence
  Synthetic
DGRWHRVAVIMG

SEQ ID NO: 526 - protein, 12 aa, Artificial Sequence
  Synthetic
APVNVTASVQIQ

SEQ ID NO: 527 - protein, 12 aa, Artificial Sequence
  Synthetic
KQGKALTQRHAK

SEQ ID NO: 528 - protein, 12 aa, Artificial Sequence
  Synthetic
AFGVLALWGTRV

SEQ ID NO: 529 - protein, 12 aa, Artificial Sequence
  Synthetic
IENVVTTFAPNR

SEQ ID NO: 530 - protein, 12 aa, Artificial Sequence
  Synthetic
LEAEFHFTHLIM

SEQ ID NO: 531 - protein, 12 aa, Artificial Sequence
  Synthetic
HLIMTFKTFRPA

SEQ ID NO: 532 - protein, 12 aa, Artificial Sequence
  Synthetic
KTWGVYRYFAYD

SEQ ID NO: 533 - protein, 12 aa, Artificial Sequence
  Synthetic
TNLRIKFVKLHT

SEQ ID NO: 534 - protein, 12 aa, Artificial Sequence
  Synthetic
REKYYYAVYDMV

SEQ ID NO: 535 - protein, 8 aa, Artificial Sequence
  Synthetic
KRLVTGQR

SEQ ID NO: 536 - protein, 12 aa, Artificial Sequence
  Synthetic
KDISEKVAVYST

SEQ ID NO: 537 - protein, 5 aa, Artificial Sequence
  Synthetic
PDSGR

SEQ ID NO: 538 - protein, 5 aa, Artificial Sequence
  Synthetic
YIGSR

SEQ ID NO: 539 - protein, 8 aa, Artificial Sequence
  Synthetic
DPGYIGSR

SEQ ID NO: 540 - protein, 11 aa, Artificial Sequence
  Synthetic
FALWDAIIGEL

SEQ ID NO: 541 - protein, 12 aa, Artificial Sequence
  Synthetic
AAEPLKNIGILF

SEQ ID NO: 542 - protein, 12 aa, Artificial Sequence
  Synthetic
DSITKYFQMSLE

SEQ ID NO: 543 - protein, 12 aa, Artificial Sequence
  Synthetic
VILQQSAADIAR

SEQ ID NO: 544 - protein, 14 aa, Artificial Sequence
  Synthetic
SPYTFIDSLVLMPY

SEQ ID NO: 545 - protein, 12 aa, Artificial Sequence
  Synthetic
KDISEKVAVYST

SEQ ID NO: 546 - protein, 6 aa, Artificial Sequence
  Synthetic
LGTIPG

SEQ ID NO: 547 - protein, 12 aa, Artificial Sequence
  Synthetic
LWPLLAVLAAVA

SEQ ID NO: 548 - protein, 12 aa, Artificial Sequence
  Synthetic
KAFDITYVRLKF

SEQ ID NO: 549 - protein, 12 aa, Artificial Sequence
  Synthetic
AFSTLEGRPSAY

SEQ ID NO: 550 - protein, 13 aa, Artificial Sequence
  Synthetic
TDIRVTLNRLNTF

SEQ ID NO: 551 - protein, 13 aa, Artificial Sequence
  Synthetic
NEPKVLKSYYYAI

SEQ ID NO: 552 - protein, 12 aa, Artificial Sequence
  Synthetic
YYAISDFAVGGR

SEQ ID NO: 553 - protein, 13 aa, Artificial Sequence
  Synthetic
LPFFNDRPWRRAT

SEQ ID NO: 554 - protein, 14 aa, Artificial Sequence
  Synthetic
FDPELYRSTGHGGH

SEQ ID NO: 555 - protein, 12 aa, Artificial Sequence
  Synthetic
TNAVGYSVYDIS

SEQ ID NO: 556 - protein, 13 aa, Artificial Sequence
  Synthetic
APVKFLGNQVLSY

SEQ ID NO: 557 - protein, 12 aa, Artificial Sequence
  Synthetic
SFSFRVDRRDTR

SEQ ID NO: 558 - protein, 13 aa, Artificial Sequence
  Synthetic
SETTVKYIFRLHE

SEQ ID NO: 559 - protein, 12 aa, Artificial Sequence
  Synthetic
FQKLLNNLTSIK

SEQ ID NO: 560 - protein, 12 aa, Artificial Sequence
  Synthetic
TSIKIRGTYSER

SEQ ID NO: 561 - protein, 6 aa, Artificial Sequence
  Synthetic
DPETGV

SEQ ID NO: 562 - protein, 12 aa, Artificial Sequence
  Synthetic
TSAEAYNLLLRT

SEQ ID NO: 563 - protein, 12 aa, Artificial Sequence
  Synthetic
KEAEREVTDLLR

SEQ ID NO: 564 - protein, 12 aa, Artificial Sequence
  Synthetic
SLLSQLNNLLDQ

SEQ ID NO: 565 - protein, 10 aa, Artificial Sequence
  Synthetic
RNIAEIIKDI

SEQ ID NO: 566 - protein, 10 aa, Artificial Sequence
  Synthetic
RDIAEIIKDI

SEQ ID NO: 567 - protein, 6 aa, Artificial Sequence
  Synthetic
GAPGER

SEQ ID NO: 568 - protein, 37 aa, Artificial Sequence
  Synthetic
FNKHTEIIEEDTNKDKPSYQFGGHNSVDFEEDTLPKV

SEQ ID NO: 569 - protein, 20 aa, Artificial Sequence
  Synthetic
PSYQFGGHNSVDFEEDTLPK

SEQ ID NO: 570 - protein, 16 aa, Artificial Sequence
  Synthetic
SYQFGGHNSVDFEEDT

SEQ ID NO: 571 - protein, 17 aa, Artificial Sequence
  Synthetic
QFGGHNSVDFEEDTLPK

SEQ ID NO: 572 - protein, 16 aa, Artificial Sequence
  Synthetic
FGGHNSVDFEEDTLPK

SEQ ID NO: 573 - protein, 109 aa, Artificial Sequence
  Synthetic
NAPQPSHISKYILRWRPKNSVGRWKEATIPGHLNSYTIKGLKPGVVYEGQLISIQQYGHQEVTRFDFTTTSTSTPVTSNTVTGETTPFSPLVATSESVTEITASSFVVS

SEQ ID NO: 574 - protein, 31 aa, Artificial Sequence
  Synthetic
NAPQPSHISKYILRWRPKNSVGRWKEATIPG

SEQ ID NO: 575 - protein, 31 aa, Artificial Sequence
  Synthetic
EATIPGHLNSYTIKGLKPGVVYEGQLISIQQ

SEQ ID NO: 576 - protein, 31 aa, Artificial Sequence
  Synthetic
LISIQQYGHQEVTRFDFTTTSTSTPVTSNTV

SEQ ID NO: 577 - protein, 34 aa, Artificial Sequence
  Synthetic
VTSNTVTGETTPFSPLVATSESVTEITASSFVVS

SEQ ID NO: 578 - protein, 44 aa, Artificial Sequence
  Synthetic
RWSHDNGVNYKIGEKWDRQGENGQMMSSTSLGNGKGEFKSDPHE

SEQ ID NO: 579 - protein, 42 aa, Artificial Sequence
  Synthetic
ATSYDDGKTYHVGEQWQKEYLGAISSSTSFGGQRGWRSDNSR

SEQ ID NO: 580 - protein, 19 aa, Artificial Sequence
  Synthetic
DKPSYQFGGHNSVDFEEDT

SEQ ID NO: 581 - protein, 20 aa, Artificial Sequence
  Synthetic
DKPSYQFGGHNSVDFEEDTL

SEQ ID NO: 582 - protein, 21 aa, Artificial Sequence
  Synthetic
DKPSYQFGGHNSVDFEEDTLP

SEQ ID NO: 583 - protein, 22 aa, Artificial Sequence
  Synthetic
DKPSYQFGGHNSVDFEEDTLPK

SEQ ID NO: 584 - protein, 18 aa, Artificial Sequence
  Synthetic
KPSYQFGGHNSVDFEEDT

SEQ ID NO: 585 - protein, 19 aa, Artificial Sequence
  Synthetic
KPSYQFGGHNSVDFEEDTL

SEQ ID NO: 586 - protein, 20 aa, Artificial Sequence
  Synthetic
KPSYQFGGHNSVDFEEDTLP

SEQ ID NO: 587 - protein, 21 aa, Artificial Sequence
  Synthetic
KPSYQFGGHNSVDFEEDTLPK

SEQ ID NO: 588 - protein, 17 aa, Artificial Sequence
  Synthetic
PSYQFGGHNSVDFEEDT

SEQ ID NO: 589 - protein, 18 aa, Artificial Sequence
  Synthetic
PSYQFGGHNSVDFEEDTL

SEQ ID NO: 590 - protein, 19 aa, Artificial Sequence
  Synthetic
PSYQFGGHNSVDFEEDTLP

SEQ ID NO: 591 - protein, 20 aa, Artificial Sequence
  Synthetic
PSYQFGGHNSVDFEEDTLPK

SEQ ID NO: 592 - protein, 20 aa, Artificial Sequence
  Synthetic
PPFLMLLKGSTRFNKTKTFR

SEQ ID NO: 593 - protein, 25 aa, Artificial Sequence
  Synthetic
RLVFALGTDGKKLRIKSKEKCNDGK

SEQ ID NO: 594 - protein, 27 aa, Artificial Sequence
  Synthetic
PLFLLHKKGKNLSKPKASQNKKGGKSK

SEQ ID NO: 595 - protein, 23 aa, Artificial Sequence
  Synthetic
TLFLAHGRLVYMFNVGHKKLKIR

SEQ ID NO: 596 - protein, 31 aa, Artificial Sequence
  Synthetic
TPGLGPRGLQATARKASRRSRQPARHPACML

SEQ ID NO: 597 - protein, 20 aa, Artificial Sequence
  Synthetic
RQRSRPGRWHKVSVRWEKNR

SEQ ID NO: 598 - protein, 12 aa, Artificial Sequence
  Synthetic
LAGSCLARFSTM

SEQ ID NO: 599 - protein, 6 aa, Artificial Sequence
  Synthetic
KGHRGF

SEQ ID NO: 600 - protein, 13 aa, Artificial Sequence
  Synthetic
GDRGIKGHRGFSG

SEQ ID NO: 601 - protein, 15 aa, Artificial Sequence
  Synthetic
GDLGRPGRKGRPGPP

SEQ ID NO: 602 - protein, 21 aa, Artificial Sequence
  Synthetic
GHRGPTGRPGKRGKQGQKGDS

SEQ ID NO: 603 - protein, 6 aa, Artificial Sequence
  Synthetic
KGIRGH

SEQ ID NO: 604 - protein, 13 aa, Artificial Sequence
  Synthetic
GEFYFDLRLKGDK

SEQ ID NO: 605 - protein, 11 aa, Artificial Sequence
  Synthetic
KYILRWRPKNS

SEQ ID NO: 606 - protein, 16 aa, Artificial Sequence
  Synthetic
YRVRVTPKEKTGPMKE

SEQ ID NO: 607 - protein, 9 aa, Artificial Sequence
  Synthetic
SPPRRARVT

SEQ ID NO: 608 - protein, 9 aa, Artificial Sequence
  Synthetic
ATETTITIS

SEQ ID NO: 609 - protein, 32 aa, Artificial Sequence
  Synthetic
VSPPRRARVTDATETTITISWRTKTETITGFG

SEQ ID NO: 610 - protein, 11 aa, Artificial Sequence
  Synthetic
KPDVRSYTITG

SEQ ID NO: 611 - protein, 12 aa, Artificial Sequence
  Synthetic
ANGQTPIQRYIK

SEQ ID NO: 612 - protein, 19 aa, Artificial Sequence
  Synthetic
YEKPGSPPREVVPRPRPGV

SEQ ID NO: 613 - protein, 15 aa, Artificial Sequence
  Synthetic
KNNQKSEPLIGRKKT

SEQ ID NO: 614 - protein, 8 aa, Artificial Sequence
  Synthetic
EILDVPST

SEQ ID NO: 615 - protein, 12 aa, Artificial Sequence
  Synthetic
TAGSCLRKFSTM

SEQ ID NO: 616 - protein, 9 aa, Artificial Sequence
  Synthetic
FRHRNRKGY

SEQ ID NO: 617 - protein, 16 aa, Artificial Sequence
  Synthetic
KKQRFRHRNRKGYRSQ

SEQ ID NO: 618 - protein, 4 aa, Artificial Sequence
  Synthetic
KRSR

SEQ ID NO: 619 - protein, 7 aa, Artificial Sequence
  Synthetic
FHRRIKA

SEQ ID NO: 620 - protein, 12 aa, Artificial Sequence
  Synthetic
SINNTAVMQRLT

SEQ ID NO: 621 - protein, 12 aa, Artificial Sequence
  Synthetic
ANVTHLLIRANY

SEQ ID NO: 622 - protein, 13 aa, Artificial Sequence
  Synthetic
AGTFALRGDNPQG

SEQ ID NO: 623 - protein, 13 aa, Artificial Sequence
  Synthetic
RLVSYSGVLFFLK

SEQ ID NO: 624 - protein, 6 aa, Artificial Sequence
  Synthetic
GIIFFL

SEQ ID NO: 625 - protein, 12 aa, Artificial Sequence
  Synthetic
VLVRVERATVFS

SEQ ID NO: 626 - protein, 17 aa, Artificial Sequence
  Synthetic
RIQNLLKITNLRIKFVK

SEQ ID NO: 627 - protein, 12 aa, Artificial Sequence
  Synthetic
GPGVVVVERQYI

SEQ ID NO: 628 - protein, 7 aa, Artificial Sequence
  Synthetic
RYVVLPR

SEQ ID NO: 629 - protein, 12 aa, Artificial Sequence
  Synthetic
LSNIDYILIKAS

SEQ ID NO: 630 - protein, 12 aa, Artificial Sequence
  Synthetic
LQQSRIANISME

SEQ ID NO: 631 - protein, 8 aa, Artificial Sequence
  Synthetic
LQVQLSIR

SEQ ID NO: 632 - protein, 12 aa, Artificial Sequence
  Synthetic
RKRLQVQLSIRT

SEQ ID NO: 633 - protein, 12 aa, Artificial Sequence
  Synthetic
GLIYYVAHQNQM

SEQ ID NO: 634 - protein, 11 aa, Artificial Sequence
  Synthetic
FDLHQNMGSVN

SEQ ID NO: 635 - protein, 12 aa, Artificial Sequence
  Synthetic
QQNLGSVNVSTG

SEQ ID NO: 636 - protein, 8 aa, Artificial Sequence
  Synthetic
WQPPRARI

SEQ ID NO: 637 - protein, 19 aa, Artificial Sequence
  Synthetic
WQPPRARITGYIIKYEKPG

SEQ ID NO: 638 - protein, 13 aa, Artificial Sequence
  Synthetic
KNSFMALYLSKGR

SEQ ID NO: 639 - protein, 15 aa, Artificial Sequence
  Synthetic
NGRKIRMRCRAIDGD

SEQ ID NO: 640 - protein, 15 aa, Artificial Sequence
  Synthetic
DVIRDKTKTKIESLK

SEQ ID NO: 641 - protein, 98 aa, Artificial Sequence
  Synthetic
GVYHREARSGKYKLTYAEAKAVCEFEGGHLATYKGLEAARKIGFHVCAAGWMAKGRVGYPIVKPGPPNCGFGKTGIIDYGIRLNRSERWDAYCYNPHA

SEQ ID NO: 642 - protein, 16 aa, Artificial Sequence
  Synthetic
KHAHLKKQVSDHIAVY

SEQ ID NO: 643 - protein, 12 aa, Artificial Sequence
  Synthetic
TTEPSEEHNHHK

SEQ ID NO: 644 - protein, 5 aa, Artificial Sequence
  Synthetic
KHAHL

SEQ ID NO: 645 - protein, 12 aa, Artificial Sequence
  Synthetic
TTEPSEEHNHHK

SEQ ID NO: 646 - protein, 16 aa, Artificial Sequence
  Synthetic
TTEPSEEHNHHKHHDK

SEQ ID NO: 647 - protein, 6 aa, Artificial Sequence
  Synthetic
HKGQHR

SEQ ID NO: 648 - protein, 22 aa, Artificial Sequence
  Synthetic
KVEHRVKKRPPTWRHNVRAKYT

SEQ ID NO: 649 - protein, 24 aa, Artificial Sequence
  Synthetic
GGKVEHRVKKRPPTWRHNVRAKYT

SEQ ID NO: 650 - protein, 11 aa, Artificial Sequence
  Synthetic
KKRPPTWRHNV

SEQ ID NO: 651 - protein, 6 aa, Artificial Sequence
  Synthetic
GTWSEW

SEQ ID NO: 652 - protein, 6 aa, Artificial Sequence
  Synthetic
GFWSEW

SEQ ID NO: 653 - protein, 6 aa, Artificial Sequence
  Synthetic
GGWSHW

SEQ ID NO: 654 - protein, 17 aa, Artificial Sequence
  Synthetic
KRFKQDGGWSHWSPWSS

SEQ ID NO: 655 - protein, 14 aa, Artificial Sequence
  Synthetic
KRFKQDGGWSHWSP

SEQ ID NO: 656 - protein, 11 aa, Artificial Sequence
  Synthetic
GGWSHWSPWSS

SEQ ID NO: 657 - protein, 5 aa, Artificial Sequence
  Synthetic
  misc_feature (3)..(3): Xaa can be any naturally occurring amino acid
WSXWS

SEQ ID NO: 658 - protein, 4 aa, Artificial Sequence
  Synthetic
WSHW

SEQ ID NO: 659 - protein, 5 aa, Artificial Sequence
  Synthetic
  misc_feature (1)..(2): Xaa can be any naturally occurring amino acid
XXPHE

SEQ ID NO: 660 - protein, 5 aa, Artificial Sequence
  Synthetic
  misc_feature (1)..(2): X is H or P
XXPHG

SEQ ID NO: 661 - protein, 148 aa, Artificial Sequence
  Synthetic
HPHKHHSHEQHPHGHHPHAHHPHEHDTHRQHPHGHHPHGHHPHGHHPHGHHPHGHHPHCHDFQDYGPCDPPPHNQGHCCHGHGPPPGHLRRRGPGKGPRPFHCRQIGSVYRLPPLRKGEVLPLPEANFPSFPLPHHKHPLKPDNQPFP

SEQ ID NO: 662 - protein, 35 aa, Artificial Sequence
  Synthetic
DLHPHKHHSHEQHPHGHHPHAHHPHEHDTHRQHPH

SEQ ID NO: 663-679 - skipped (17 entries)

SEQ ID NO: 680 - protein, 14 aa, Artificial Sequence
  Synthetic
QFGGHNSVDFEEDT

SEQ ID NO: 681-700 - skipped (20 entries)

SEQ ID NO: 701 - protein, 8 aa, Artificial Sequence
  Synthetic
KRALGLPG

SEQ ID NO: 702 - protein, 40 aa, Artificial Sequence
  Synthetic
DEDEDEDEDEDEDEDERPLALWRSDRDRDRDRDRDRDRDR

SEQ ID NO: 703 - protein, 5 aa, Artificial Sequence
  Synthetic
  misc_feature (3)..(3): X is S or T
  misc_feature (4)..(4): X is L or I
  misc_feature (5)..(5): X is S or T
PRXXX

SEQ ID NO: 704 - protein, 5 aa, Artificial Sequence
  Synthetic
LEATA

SEQ ID NO: 705 - protein, 10 aa, Artificial Sequence
  Synthetic
GGAANLVRGG

SEQ ID NO: 706 - protein, 10 aa, Artificial Sequence
  Synthetic
SGRIGFLRTA

SEQ ID NO: 707 - protein, 6 aa, Artificial Sequence
  Synthetic
PLGLAG

SEQ ID NO: 708 - protein, 6 aa, Artificial Sequence
  Synthetic
  misc_feature (6)..(6): Xaa can be any naturally occurring amino acid
PLGLAX

SEQ ID NO: 709 - protein, 6 aa, Artificial Sequence
  Synthetic
  misc_feature (4)..(4): Xaa is methylcysteine
PLGXAG

SEQ ID NO: 710 - protein, 8 aa, Artificial Sequence
  Synthetic
ESPAYYTA

SEQ ID NO: 711 - protein, 6 aa, Artificial Sequence
  Synthetic
RLQLKL

SEQ ID NO: 712 - protein, 7 aa, Artificial Sequence
  Synthetic
RLQLKAC

SEQ ID NO: 713 - protein, 7 aa, Artificial Sequence
  Synthetic
  misc_feature (3)..(3): Xaa is citrulline
  misc_feature (5)..(5): Xaa is homophenylalanine
EPXGXYL

SEQ ID NO: 714 - protein, 5 aa, Artificial Sequence
  Synthetic
SGRSA

SEQ ID NO: 715 - protein, 4 aa, Artificial Sequence
  Synthetic
DAFK

SEQ ID NO: 716 - protein, 5 aa, Artificial Sequence
  Synthetic
GGGRR

SEQ ID NO: 717 - protein, 4 aa, Artificial Sequence
  Synthetic
GFLG

SEQ ID NO: 718 - protein, 4 aa, Artificial Sequence
  Synthetic
ALAL

SEQ ID NO: 719 - protein, 2 aa, Artificial Sequence
  Synthetic
FK

SEQ ID NO: 720 - protein, 3 aa, Artificial Sequence
  Synthetic
NLL

SEQ ID NO: 721 - protein, 6 aa, Artificial Sequence
  Synthetic
  misc_feature (4)..(4): Xaa is ethionine
PICXFF

SEQ ID NO: 722 - protein, 8 aa, Artificial Sequence
  Synthetic
GGPRGLPG

SEQ ID NO: 723 - protein, 6 aa, Artificial Sequence
  Synthetic
HSSKLQ

SEQ ID NO: 724 - protein, 7 aa, Artificial Sequence
  Synthetic
HSSKLQL

SEQ ID NO: 725 - protein, 9 aa, Artificial Sequence
  Synthetic
HSSKLQEDA

SEQ ID NO: 726 - protein, 10 aa, Artificial Sequence
  Synthetic
LVLASSSFGY

SEQ ID NO: 727 - protein, 10 aa, Artificial Sequence
  Synthetic
GVSQNYPIVG

SEQ ID NO: 728 - protein, 10 aa, Artificial Sequence
  Synthetic
GVVQASCRLA

SEQ ID NO: 729 - protein, 4 aa, Artificial Sequence
  Synthetic
  misc_feature (2)..(2): Xaa is piperidine
FXRS

SEQ ID NO: 730 - protein, 6 aa, Artificial Sequence
  Synthetic
DPRSFL

SEQ ID NO: 731 - protein, 6 aa, Artificial Sequence
  Synthetic
PPRSFL

SEQ ID NO: 732 - protein, 4 aa, Artificial Sequence
  Synthetic
DEVD

SEQ ID NO: 733 - protein, 5 aa, Artificial Sequence
  Synthetic
DEVDP

SEQ ID NO: 734 - protein, 8 aa, Artificial Sequence
  Synthetic
KGSGDVEG

SEQ ID NO: 735 - protein, 6 aa, Artificial Sequence
  Synthetic
GWEHDG

SEQ ID NO: 736 - protein, 7 aa, Artificial Sequence
  Synthetic
EDDDDKA

SEQ ID NO: 737 - protein, 9 aa, Artificial Sequence
  Synthetic
KQEQNPGST

SEQ ID NO: 738 - protein, 6 aa, Artificial Sequence
  Synthetic
GKAFRR

SEQ ID NO: 739 - protein, 4 aa, Artificial Sequence
  Synthetic
DAFK

SEQ ID NO: 740 - protein, 4 aa, Artificial Sequence
  Synthetic
DVLK

SEQ ID NO: 741 - protein, 4 aa, Artificial Sequence
  Synthetic
DAFK

SEQ ID NO: 742 - protein, 7 aa, Artificial Sequence
  Synthetic
ALLLALL

SEQ ID NO: 743-746 - skipped (4 entries)

SEQ ID NO: 747 - protein, 248 aa, Homo sapiens
DIVMTQSPDSLAVSLGERATINCKSSQSVLYSNNNKNYLAWYQQKPGQPPKLLIYGASTRESWVPDRFSGSGSGTDFTLTISSLQAEDVAVYYCQQWYYYPYTFGQGTKVEIKGGGGSGGGGSGGGSGGGGSEVQLLESGGGLVQPGGSLRLSCAASGFTFSSYYMSWVRQAPGKGLEWVSDISGRGGQTNYADSVKGRFTISRDNSKNTLYLQMNSLRAEDTAVYYCARGGGSFANWGRGTLVTVSS

SEQ ID NO: 748 - protein, 113 aa, Homo sapiens
DIVMTQSPDSLAVSLGERATINCKSSQSVLYSNNNKNYLAWYQQKPGQPPKLLIYGASTRESWVPDRFSGSGSGTDFTLTISSLQAEDVAVYYCQQWYYYPYTFGQGTKVEIK

SEQ ID NO: 749 - protein, 116 aa, Homo sapiens
EVQLLESGGGLVQPGGSLRLSCAASGFTFSSYYMSWVRQAPGKGLEWVSDISGRGGQTNYADSVKGRFTISRDNSKNTLYLQMNSLRAEDTAVYYCARGGGSFANWGRGTLVTVSS

SEQ ID NO: 750 - protein, 17 aa, Artificial Sequence
  Synthetic
KSSQSVLYSNNNKNYLA

SEQ ID NO: 751 - protein, 7 aa, Artificial Sequence
  Synthetic
GASTRES

SEQ ID NO: 752 - protein, 9 aa, Artificial Sequence
  Synthetic
QQWYYYPYT

SEQ ID NO: 753 - protein, 6 aa, Artificial Sequence
  Synthetic
SSYYMS

SEQ ID NO: 754 - protein, 17 aa, Artificial Sequence
  Synthetic
DISGRGGQTNYADSVKG

SEQ ID NO: 755 - protein, 8 aa, Artificial Sequence
  Synthetic
RGGGSFAN

SEQ ID NO: 756 - protein, 226 aa, Homo sapiens
DKTHTCPPCPAPELLGGPSVFLFPPKPKDTLMISRTPEVTCVVVDVSHEDPEVKFNWYVDGVEVHNAKTKPREEQYNSTYRVVSVLTVLHQDWLNGKEYKCKVSNKALPAPIEKTISKAKGQPREPQVYTLPPSRDELTENQVSLTCLVKGFYPSDIAVEWESNGQPENNYKTTPPVLDSDGSFFLYSWLTVDKSRWQQGNVFSCSVMHEALHNHYTQKSLSLSPG

SEQ ID NO: 757 - protein, 226 aa, Homo sapiens
DKTHTCPPCPAPELLGGPSVFLFPPKPKDTLMISRTPEVTCVVVDVSHEDPEVKFNWYVDGVEVHNAKTKPREEQYNSTYRVVSVLTVLHQDWLNGKEYKCKVSNKALPAPIEKTISKAKGQPREPRVYTLPPSRDELTKNQVSLTCLVKGFYPSDIAVEWESNGQPENNYKTTPPVLVSDGSFTLYSKLTVDKSRWQQGNVFSCSVMHEALHNHYTQKSLSLSPG

SEQ ID NO: 758-799 - skipped (42 entries)

SEQ ID NO: 800 - protein, 768 aa, Artificial Sequence
  Synthetic
MVSKGEELFTGVVPILVELDGDVNGHKFSVSGEGEGDATYGKLTLKFICTTGKLPVPWPTLVTTLTYGVQCFSRYPDHMKQHDFFKSAMPEGYVQERTIFFKDDGNYKTRAEVKFEGDTLVNRIELKGIDFKEDGNILGHKLEYNYNSHNVYIMADKQKNGIKVNFKIRHNIEDGSVQLADHYQQNTPIGDGPVLLPDNHYLSTQSKLSKDPNEKRDHMVLLEFVTAAGITLGMDELYKGGGGSASKAQKAQAKQWKQAQKAQKAQAKQAKQAKQWSGGGGSGGGGGPLGVRGGGGGSGGGGSMVSKGEELIKENMHMKLYMEGTVNNHHFKCTSEGEGKPYEGTQTMRIKVVEGGPLPFAFDILATSFMYGSRTFINHTQGIPDFFKQSFPEGFTWERVTTYEDGGVLTATQDTSLQDGCLIYNVKIRGVNFPSNGPVMQKKTLGWEANTEMLYPADGGLEGRSDMALKLVGGGHLICNFKTTYRSKKPAKNLKMPGVYYVDHRLERIKEADKETYVEQHEVAVARYCDLPSKLGHKLNGSGGGGGCKPCICTVPEVSSVFIFPPKPKDVLTITLTPKVTCVVVDISKDDPEVQFSWFVDDVEVHTAQTQPREEQFNSTFRSVSELPIMHQDWLNGKEFKCRVNSAAFPAPIEKTISKTKGRPKAPQVYTIPPPKEQMAKDKVSLTCMITDFFPEDITVEWQWNGQPAENYKNTQPIMDTDGSYFVYSKLNVQKSNWEAGNTFTCSVLHEGLHNHHTEKSLSHSPGK

SEQ ID NO: 801 - protein, 731 aa, Artificial Sequence
  Synthetic
MVSKGEELFTGVVPILVELDGDVNGHKFSVSGEGEGDATYGKLTLKFICTTGKLPVPWPTLVTTLTYGVQCFSRYPDHMKQHDFFKSAMPEGYVQERTIFFKDDGNYKTRAEVKFEGDTLVNRIELKGIDFKEDGNILGHKLEYNYNSHNVYIMADKQKNGIKVNFKIRHNIEDGSVQLADHYQQNTPIGDGPVLLPDNHYLSTQSKLSKDPNEKRDHMVLLEFVTAAGITLGMDELYKSGGGGSGGGGGPLGVRGGGGGSGGGGSMVSKGEELIKENMHMKLYMEGTVNNHHFKCTSEGEGKPYEGTQTMRIKVVEGGPLPFAFDILATSFMYGSRTFINHTQGIPDFFKQSFPEGFTWERVTTYEDGGVLTATQDTSLQDGCLIYNVKIRGVNFPSNGPVMQKKTLGWEANTEMLYPADGGLEGRSDMALKLVGGGHLICNFKTTYRSKKPAKNLKMPGVYYVDHRLERIKEADKETYVEQHEVAVARYCDLPSKLGHKLNGSGGGGGCKPCICTVPEVSSVFIFPPKPKDVLTITLTPKVTCVVVDISKDDPEVQFSWFVDDVEVHTAQTQPREEQFNSTFRSVSELPIMHQDWLNGKEFKCRVNSAAFPAPIEKTISKTKGRPKAPQVYTIPPPKEQMAKDKVSLTCMITDFFPEDITVEWQWNGQPAENYKNTQPIMDTDGSYFVYSKLNVQKSNWEAGNTFTCSVLHEGLHNHHTEKSLSHSPGK

SEQ ID NO: 802 - protein, 768 aa, Artificial Sequence
  Synthetic
MVSKGEELFTGVVPILVELDGDVNGHKFSVSGEGEGDATYGKLTLKFICTTGKLPVPWPTLVTTLTYGVQCFSRYPDHMKQHDFFKSAMPEGYVQERTIFFKDDGNYKTRAEVKFEGDTLVNRIELKGIDFKEDGNILGHKLEYNYNSHNVYIMADKQKNGIKVNFKIRHNIEDGSVQLADHYQQNTPIGDGPVLLPDNHYLSTQSKLSKDPNEKRDHMVLLEFVTAAGITLGMDELYKSGGGGSGGGGGPLGVRGGGGGSGGGGSMVSKGEELIKENMHMKLYMEGTVNNHHFKCTSEGEGKPYEGTQTMRIKVVEGGPLPFAFDILATSFMYGSRTFINHTQGIPDFFKQSFPEGFTWERVTTYEDGGVLTATQDTSLQDGCLIYNVKIRGVNFPSNGPVMQKKTLGWEANTEMLYPADGGLEGRSDMALKLVGGGHLICNFKTTYRSKKPAKNLKMPGVYYVDHRLERIKEADKETYVEQHEVAVARYCDLPSKLGHKLNGSGGGGGCKPCICTVPEVSSVFIFPPKPKDVLTITLTPKVTCVVVDISKDDPEVQFSWFVDDVEVHTAQTQPREEQFNSTFRSVSELPIMHQDWLNGKEFKCRVNSAAFPAPIEKTISKTKGRPKAPQVYTIPPPKEQMAKDKVSLTCMITDFFPEDITVEWQWNGQPAENYKNTQPIMDTDGSYFVYSKLNVQKSNWEAGNTFTCSVLHEGLHNHHTEKSLSHSPGKGGGGSASKAQKAQAKQWKQAQKAQKAQAKQAKQAKQW

SEQ ID NO: 803 - protein, 600 aa, Artificial Sequence
  Synthetic
APTSSSTKKTQLQLEHLLLDLQMILNGINNYKNPKLTRMLTFKFYMPKKATELKHLQCLEEELKPLEEVLNLAQSKNFHLRPRDLISNINVIVLELKGSETTFMCEYADETATIVEFLNRWITFSQSIISTLTSGGGGSGGGGGPLGVRGGGGGSGGGGSELCLYDPPEVPNATFKALSYKNGTILNCECKRGFRRLKELVYMRCLGNSWSSNCQCTSSATRNTTKQVTPQPEEQKERKTTEMQSPMQPVDQASLPGHCREPPPWENEATERIYHFVVGQMVYYQCVQGYRALHRGPAESVCKMTHGKTRWTQPQLICTGEMETSQFPGEEKPQASPEGRPESETSCLVTTTDFQIQTEMAATMETSIFTTEYQDKTHTCPPCPAPELLGGPSVFLFPPKPKDTLMISRTPEVTCVVVDVSHEDPEVKFNWYVDGVEVHNAKTKPREEQYNSTYRVVSVLTVLHQDWLNGKEYKCKVSNKALPAPIEKTISKAKGQPREPQVYTLPPSRDELTKNQVSLTCLVKGFYPSDIAVEWESNGQPENNYKTTPPVLDSDGSFFLYSKLTVDKSRWQQGNVFSCSVMHEALHNHYTQKSLSLSPG

SEQ ID NO: 804 - protein, 611 aa, Artificial Sequence
  Synthetic
APTSSSTKKTQLQLEHLLLDLQMILNGINNYKNPKLTRMLTFKFYMPKKATELKHLQCLEEELKPLEEVLNLAQSKNFHLRPRDLISNINVIVLELKGSETTFMCEYADETATIVEFLNRWITFSQSIISTLTSGGGGSGGGGGPLGVRGGGGGSGGGGSELCDDDPPEIPHATFKAMAYKEGTMLNCECKRGFRRIKSGSLYMLCTGNSSHSSWDNQCQCTSSATRNTTKQVTPQPEEQKERKTTEMQSPMQPVDQASLPGHCREPPPWENEATERIYHFVVGQMVYYQCVQGYRALHRGPAESVCKMTHGKTRWTQPQLICTGEMETSQFPGEEKPQASPEGRPESETSCLVTTTDFQIQTEMAATMETSIFTTEYQGSGGGGDKTHTCPPCPAPELLGGPSVFLFPPKPKDTLMISRTPEVTCVVVDVSHEDPEVKFNWYVDGVEVHNAKTKPREEQYNSTYRVVSVLTVLHQDWLNGKEYKCKVSNKALPAPIEKTISKAKGQPREPQVYTLPPSRDELTKNQVSLTCLVKGFYPSDIAVEWESNGQPENNYKTTPPVLDSDGSFFLYSKLTVDKSRWQQGNVFSCSVMHEALHNHYTQKSLSLSPG

SEQ ID NO: 805 - protein, 570 aa, Artificial Sequence
  Synthetic
APTSSSTKKTQLQLEHLLLDLQMILNGINNYKNPKLTRMLTFKFYMPKKATELKHLQCLEEELKPLEEVLNLAQSKNFHLRPRDLISNINVIVLELKGSETTFMCEYADETATIVEFLNRWITFSQSIISTLTSGGGGSGGGGGPLGVRGGGGGSGGGGSELCDDDPPEIPHATFKAMAYKEGTMLNCECKRGFRRIKSGSLYMLCTGNSSHSSWDNQCQCTSSATRNTTKQVTPQPEEQKERKTTEMQSPMQPVDQASLPGHCREPPPWENEATERIYHFVVGQMVYYQCVQGYRALHRGPAESVCKMTHGKTRWTQPQLICTGEMETSQFPGEEKPGSGGGGDKTHTCPPCPAPELLGGPSVFLFPPKPKDTLMISRTPEVTCVVVDVSHEDPEVKFNWYVDGVEVHNAKTKPREEQYNSTYRVVSVLTVLHQDWLNGKEYKCKVSNKALPAPIEKTISKAKGQPREPQVYTLPPSRDELTKNQVSLTCLVKGFYPSDIAVEWESNGQPENNYKTTPPVLDSDGSFFLYSKLTVDKSRWQQGNVFSCSVMHEALHNHYTQKSLSLSPG

SEQ ID NO: 806 - protein, 621 aa, Artificial Sequence
  Synthetic
APTSSSTKKTQLQLEHLLLDLQMILNGINNYKNPKLTRMLTFKFYMPKKATELKHLQCLEEELKPLEEVLNLAQSKNFHLRPRDLISNINVIVLELKGSETTFMCEYADETATIVEFLNRWITFSQSIISTLTSGGGGSGGGGGPLGVRGGGGGSGGGGSGGGGSGGGGSELCDDDPPEIPHATFKAMAYKEGTMLNCECKRGFRRIKSGSLYMLCTGNSSHSSWDNQCQCTSSATRNTTKQVTPQPEEQKERKTTEMQSPMQPVDQASLPGHCREPPPWENEATERIYHFVVGQMVYYQCVQGYRALHRGPAESVCKMTHGKTRWTQPQLICTGEMETSQFPGEEKPQASPEGRPESETSCLVTTTDFQIQTEMAATMETSIFTTEYQGSGGGGDKTHTCPPCPAPELLGGPSVFLFPPKPKDTLMISRTPEVTCVVVDVSHEDPEVKFNWYVDGVEVHNAKTKPREEQYNSTYRVVSVLTVLHQDWLNGKEYKCKVSNKALPAPIEKTISKAKGQPREPQVYTLPPSRDELTKNQVSLTCLVKGFYPSDIAVEWESNGQPENNYKTTPPVLDSDGSFFLYSKLTVDKSRWQQGNVFSCSVMHEALHNHYTQKSLSLSPG

SEQ ID NO: 807 - protein, 631 aa, Artificial Sequence
  Synthetic
APTSSSTKKTQLQLEHLLLDLQMILNGINNYKNPKLTRMLTFKFYMPKKATELKHLQCLEEELKPLEEVLNLAQSKNFHLRPRDLISNINVIVLELKGSETTFMCEYADETATIVEFLNRWITFSQSIISTLTSGGGGSGGGGGPLGVRGGGGGSGGGGSGGGGSGGGGSGGGGSGGGGSELCDDDPPEIPHATFKAMAYKEGTMLNCECKRGFRRIKSGSLYMLCTGNSSHSSWDNQCQCTSSATRNTTKQVTPQPEEQKERKTTEMQSPMQPVDQASLPGHCREPPPWENEATERIYHFVVGQMVYYQCVQGYRALHRGPAESVCKMTHGKTRWTQPQLICTGEMETSQFPGEEKPQASPEGRPESETSCLVTTTDFQIQTEMAATMETSIFTTEYQGSGGGGDKTHTCPPCPAPELLGGPSVFLFPPKPKDTLMISRTPEVTCVVVDVSHEDPEVKFNWYVDGVEVHNAKTKPREEQYNSTYRVVSVLTVLHQDWLNGKEYKCKVSNKALPAPIEKTISKAKGQPREPQVYTLPPSRDELTKNQVSLTCLVKGFYPSDIAVEWESNGQPENNYKTTPPVLDSDGSFFLYSKLTVDKSRWQQGNVFSCSVMHEALHNHYTQKSLSLSPG

SEQ ID NO: 808 - protein, 613 aa, Artificial Sequence
  Synthetic
APTSSSTSSSTAEAQQQQQQQQQQQQHLEQLLMDLQELLSRMENYRNLKLPRMLTFKFYLPKQATELKDLQCLEDELGPLRHVLDLTQSKSFQLEDAENFISNIRVTVVKLKGSDNTFECQFDDESATVVDFLRRWIAFSQSIISTSPQSGGGGSGGGGGPAALIGGGGGSGGGGSELCLYDPPEVPNATFKALSYKNGTILNCECKRGFRRLKELVYMRCLGNSWSSNCQCTSNSHDKSRKQVTAQLEHQKEQQTTTDMQKPTQSMHQENLTGHCREPPPWKHEDSKRIYHFVEGQSVHYECIPGYKALQRGPAISICKMKCGKTGWTQPQLTCVDEREHHRFLASEESQGSRNSSPESETSCPITTTDFPQPTETTAMTETFVLTMEYKGCKPCICTVPEVSSVFIFPPKPKDVLTITLTPKVTCVVVDISKDDPEVQFSWFVDDVEVHTAQTQPREEQFNSTFRSVSELPIMHQDWLNGKEFKCRVNSAAFPAPIEKTISKTKGRPKAPQVYTIPPPKEQMAKDKVSLTCMITDFFPEDITVEWQWNGQPAENYKNTQPIMDTDGSYFVYSKLNVQKSNWEAGNTFTCSVLHEGLHNHHTEKSLSHSPGK

SEQ ID NO: 809 - protein, 622 aa, Artificial Sequence
  Synthetic
APTSSSTSSSTAEAQQQQQQQQQQQQHLEQLLMDLQELLSRMENYRNLKLPRMLTFKFYLPKQATELKDLQCLEDELGPLRHVLDLTQSKSFQLEDAENFISNIRVTVVKLKGSDNTFECQFDDESATVVDFLRRWIAFSQSIISTSPQVRIQRKKEKMKETGPLGVRGGGGGSGGGGSELCLYDPPEVPNATFKALSYKNGTILNCECKRGFRRLKELVYMRCLGNSWSSNCQCTSNSHDKSRKQVTAQLEHQKEQQTTTDMQKPTQSMHQENLTGHCREPPPWKHEDSKRIYHFVEGQSVHYECIPGYKALQRGPAISICKMKCGKTGWTQPQLTCVDEREHHRFLASEESQGSRNSSPESETSCPITTTDFPQPTETTAMTETFVLTMEYKIEGRMDGCKPCICTVPEVSSVFIFPPKPKDVLTITLTPKVTCVVVDISKDDPEVQFSWFVDDVEVHTAQTQPREEQFNSTFRSVSELPIMHQDWLNGKEFKCRVNSAAFPAPIEKTISKTKGRPKAPQVYTIPPPKEQMAKDKVSLTCMITDFFPEDITVEWQWNGQPAENYKNTQPIMDTDGSYFVYSKLNVQKSNWEAGNTFTCSVLHEGLHNHHTEKSLSHSPGK

SEQ ID NO: 810 - protein, 613 aa, Artificial Sequence
  Synthetic
APTSSSTSSSTAEAQQQQQQQQQQQQHLEQLLMDLQELLSRMENYRNLKLPRMLTFKFYLPKQATELKDLQCLEDELGPLRHVLDLTQSKSFQLEDAENFISNIRVTVVKLKGSDNTFECQFDDESATVVDFLRRWIAFCQSIISTSPQSGGGGSGGGGGPLGLARGGGGSGGGGSELCLYDPPEVPNATFKALSYKNGTILNCECKRGFRRLKELVYMRCLGNSWSSNCQCTSNSHDKSRKQVTAQLEHQKEQQTTTDMQKPTQSMHQENLTGHCREPPPWKHEDSKRIYHFVEGQSVHYECIPGYKALQRGPAISICKMKCGKTGWTQPQLTCVDEREHHRFLASEESQGSRNSSPESETSCPITTTDFPQPTETTAMTETFVLTMEYKGCKPCICTVPEVSSVFIFPPKPKDVLTITLTPKVTCVVVDISKDDPEVQFSWFVDDVEVHTAQTQPREEQFNSTFRSVSELPIMHQDWLNGKEFKCRVNSAAFPAPIEKTISKTKGRPKAPQVYTIPPPKEQMAKDKVSLTCMITDFFPEDITVEWQWNGQPAENYKNTQPIMDTDGSYFVYSKLNVQKSNWEAGNTFTCSVLHEGLHNHHTEKSLSHSPGK

SEQ ID NO: 811 - protein, 613 aa, Artificial Sequence
  Synthetic
APTSSSTSSSTAEAQQQQQQQQQQQQHLEQLLMDLQELLSRMENYRNLKLPRMLTFKFYLPKQATELKDLQCLEDELGPLRHVLDLTQSKSFQLEDAENFISNIRVTVVKLKGSDNTFECQFDDESATVVDFLRRWIAFCQSIISTSPQSGGFHRRIKAGPLGVRGGGGGSGGGGSELCLYDPPEVPNATFKALSYKNGTILNCECKRGFRRLKELVYMRCLGNSWSSNCQCTSNSHDKSRKQVTAQLEHQKEQQTTTDMQKPTQSMHQENLTGHCREPPPWKHEDSKRIYHFVEGQSVHYECIPGYKALQRGPAISICKMKCGKTGWTQPQLTCVDEREHHRFLASEESQGSRNSSPESETSCPITTTDFPQPTETTAMTETFVLTMEYKGCKPCICTVPEVSSVFIFPPKPKDVLTITLTPKVTCVVVDISKDDPEVQFSWFVDDVEVHTAQTQPREEQFNSTFRSVSELPIMHQDWLNGKEFKCRVNSAAFPAPIEKTISKTKGRPKAPQVYTIPPPKEQMAKDKVSLTCMITDFFPEDITVEWQWNGQPAENYKNTQPIMDTDGSYFVYSKLNVQKSNWEAGNTFTCSVLHEGLHNHHTEKSLSHSPGK

SEQ ID NO: 812 - protein, 613 aa, Artificial Sequence
  Synthetic
APTSSSTSSSTAEAQQQQQQQQQQQQHLEQLLMDLQELLSRMENYRNLKLPRMLTFKFYLPKQATELKDLQCLEDELGPLRHVLDLTQSKSFQLEDAENFISNIRVTVVKLKGSDNTFECQFDDESATVVDFLRRWIAFCQSIISTSPQSGGFHRRIKAGVRLGPGGGGGSGGGGSELCLYDPPEVPNATFKALSYKNGTILNCECKRGFRRLKELVYMRCLGNSWSSNCQCTSNSHDKSRKQVTAQLEHQKEQQTTTDMQKPTQSMHQENLTGHCREPPPWKHEDSKRIYHFVEGQSVHYECIPGYKALQRGPAISICKMKCGKTGWTQPQLTCVDEREHHRFLASEESQGSRNSSPESETSCPITTTDFPQPTETTAMTETFVLTMEYKGCKPCICTVPEVSSVFIFPPKPKDVLTITLTPKVTCVVVDISKDDPEVQFSWFVDDVEVHTAQTQPREEQFNSTFRSVSELPIMHQDWLNGKEFKCRVNSAAFPAPIEKTISKTKGRPKAPQVYTIPPPKEQMAKDKVSLTCMITDFFPEDITVEWQWNGQPAENYKNTQPIMDTDGSYFVYSKLNVQKSNWEAGNTFTCSVLHEGLHNHHTEKSLSHSPGK

SEQ ID NO: 813 - protein, 613 aa, Artificial Sequence
  Synthetic
APTSSSTSSSTAEAQQQQQQQQQQQQHLEQLLMDLQELLSRMENYRNLKLPRMLTFKFYLPKQATELKDLQCLEDELGPLRHVLDLTQSKSFQLEDAENFISNIRVTVVKLKGSDNTFECQFDDESATVVDFLRRWIAFCQSIISTSPQGHHPHGHHPHGPLGVRGGGGGSGGGGSELCLYDPPEVPNATFKALSYKNGTILNCECKRGFRRLKELVYMRCLGNSWSSNCQCTSNSHDKSRKQVTAQLEHQKEQQTTTDMQKPTQSMHQENLTGHCREPPPWKHEDSKRIYHFVEGQSVHYECIPGYKALQRGPAISICKMKCGKTGWTQPQLTCVDEREHHRFLASEESQGSRNSSPESETSCPITTTDFPQPTETTAMTETFVLTMEYKGCKPCICTVPEVSSVFIFPPKPKDVLTITLTPKVTCVVVDISKDDPEVQFSWFVDDVEVHTAQTQPREEQFNSTFRSVSELPIMHQDWLNGKEFKCRVNSAAFPAPIEKTISKTKGRPKAPQVYTIPPPKEQMAKDKVSLTCMITDFFPEDITVEWQWNGQPAENYKNTQPIMDTDGSYFVYSKLNVQKSNWEAGNTFTCSVLHEGLHNHHTEKSLSHSPGK

SEQ ID NO: 814 - protein, 613 aa, Artificial Sequence
  Synthetic
APTSSSTSSSTAEAQQQQQQQQQQQQHLEQLLMDLQELLSRMENYRNLKLPRMLTFKFYLPKQATELKDLQCLEDELGPLRHVLDLTQSKSFQLEDAENFISNIRVTVVKLKGSDNTFECQFDDESATVVDFLRRWIAFCQSIISTSPQGHHPHGHHPHGVRLGPGGGGGSGGGGSELCLYDPPEVPNATFKALSYKNGTILNCECKRGFRRLKELVYMRCLGNSWSSNCQCTSNSHDKSRKQVTAQLEHQKEQQTTTDMQKPTQSMHQENLTGHCREPPPWKHEDSKRIYHFVEGQSVHYECIPGYKALQRGPAISICKMKCGKTGWTQPQLTCVDEREHHRFLASEESQGSRNSSPESETSCPITTTDFPQPTETTAMTETFVLTMEYKGCKPCICTVPEVSSVFIFPPKPKDVLTITLTPKVTCVVVDISKDDPEVQFSWFVDDVEVHTAQTQPREEQFNSTFRSVSELPIMHQDWLNGKEFKCRVNSAAFPAPIEKTISKTKGRPKAPQVYTIPPPKEQMAKDKVSLTCMITDFFPEDITVEWQWNGQPAENYKNTQPIMDTDGSYFVYSKLNVQKSNWEAGNTFTCSVLHEGLHNHHTEKSLSHSPGK

SEQ ID NO: 815 - protein, 612 aa, Artificial Sequence
  Synthetic
APTSSSTSSSTAEAQQQQQQQQQQQQHLEQLLMDLQELLSRMENYRNLKLPRMLTFKFYLPKQATELKDLQCLEDELGPLRHVLDLTQSKSFQLEDAENFISNIRVTVVKLKGSDNTFECQFDDESATVVDFLRRWIAFCQSIISTSPQSGGGGWSHWGPLGVRGGGGGSGGGGSELCLYDPPEVPNATFKALSYKNGTILNCECKRGFRRLKELVYMRCLGNSWSSNCQCTSNSHDKSRKQVTAQLEHQKEQQTTTDMQKPTQSMHQENLTGHCREPPPWKHEDSKRIYHFVEGQSVHYECIPGYKALQRGPAISICKMKCGKTGWTQPQLTCVDEREHHRFLASEESQGSRNSSPESETSCPITTTDFPQPTETTAMTETFVLTMEYKGCKPCICTVPEVSSVFIFPPKPKDVLTITLTPKVTCVVVDISKDDPEVQFSWFVDDVEVHTAQTQPREEQFNSTFRSVSELPIMHQDWLNGKEFKCRVNSAAFPAPIEKTISKTKGRPKAPQVYTIPPPKEQMAKDKVSLTCMITDFFPEDITVEWQWNGQPAENYKNTQPIMDTDGSYFVYSKLNVQKSNWEAGNTFTCSVLHEGLHNHHTEKSLSHSPGK

SEQ ID NO: 816 - protein, 612 aa, Artificial Sequence
  Synthetic
APTSSSTSSSTAEAQQQQQQQQQQQQHLEQLLMDLQELLSRMENYRNLKLPRMLTFKFYLPKQATELKDLQCLEDELGPLRHVLDLTQSKSFQLEDAENFISNIRVTVVKLKGSDNTFECQFDDESATVVDFLRRWIAFCQSIISTSPQSGGGGWSHWGVRLGPGGGGGSGGGGSELCLYDPPEVPNATFKALSYKNGTILNCECKRGFRRLKELVYMRCLGNSWSSNCQCTSNSHDKSRKQVTAQLEHQKEQQTTTDMQKPTQSMHQENLTGHCREPPPWKHEDSKRIYHFVEGQSVHYECIPGYKALQRGPAISICKMKCGKTGWTQPQLTCVDEREHHRFLASEESQGSRNSSPESETSCPITTTDFPQPTETTAMTETFVLTMEYKGCKPCICTVPEVSSVFIFPPKPKDVLTITLTPKVTCVVVDISKDDPEVQFSWFVDDVEVHTAQTQPREEQFNSTFRSVSELPIMHQDWLNGKEFKCRVNSAAFPAPIEKTISKTKGRPKAPQVYTIPPPKEQMAKDKVSLTCMITDFFPEDITVEWQWNGQPAENYKNTQPIMDTDGSYFVYSKLNVQKSNWEAGNTFTCSVLHEGLHNHHTEKSLSHSPGK

SEQ ID NO: 817 - protein, 613 aa, Artificial Sequence
  Synthetic
APTSSSTSSSTAEAQQQQQQQQQQQQHLEQLLMDLQELLSRMENYRNLKLPRMLTFKFYLPKQATELKDLQCLEDELGPLRHVLDLTQSKSFQLEDAENFISNIRVTVVKLKGSDNTFECQFDDESATVVDFLRRWIAFCQSIISTSPQSGGKLWVLPKGPLGVRGGGGGSGGGGSELCLYDPPEVPNATFKALSYKNGTILNCECKRGFRRLKELVYMRCLGNSWSSNCQCTSNSHDKSRKQVTAQLEHQKEQQTTTDMQKPTQSMHQENLTGHCREPPPWKHEDSKRIYHFVEGQSVHYECIPGYKALQRGPAISICKMKCGKTGWTQPQLTCVDEREHHRFLASEESQGSRNSSPESETSCPITTTDFPQPTETTAMTETFVLTMEYKGCKPCICTVPEVSSVFIFPPKPKDVLTITLTPKVTCVVVDISKDDPEVQFSWFVDDVEVHTAQTQPREEQFNSTFRSVSELPIMHQDWLNGKEFKCRVNSAAFPAPIEKTISKTKGRPKAPQVYTIPPPKEQMAKDKVSLTCMITDFFPEDITVEWQWNGQPAENYKNTQPIMDTDGSYFVYSKLNVQKSNWEAGNTFTCSVLHEGLHNHHTEKSLSHSPGK

SEQ ID NO: 818 - protein, 613 aa, Artificial Sequence
  Synthetic
APTSSSTSSSTAEAQQQQQQQQQQQQHLEQLLMDLQELLSRMENYRNLKLPRMLTFKFYLPKQATELKDLQCLEDELGPLRHVLDLTQSKSFQLEDAENFISNIRVTVVKLKGSDNTFECQFDDESATVVDFLRRWIAFCQSIISTSPQSGGKLWVLPKGVRLGPGGGGGSGGGGSELCLYDPPEVPNATFKALSYKNGTILNCECKRGFRRLKELVYMRCLGNSWSSNCQCTSNSHDKSRKQVTAQLEHQKEQQTTTDMQKPTQSMHQENLTGHCREPPPWKHEDSKRIYHFVEGQSVHYECIPGYKALQRGPAISICKMKCGKTGWTQPQLTCVDEREHHRFLASEESQGSRNSSPESETSCPITTTDFPQPTETTAMTETFVLTMEYKGCKPCICTVPEVSSVFIFPPKPKDVLTITLTPKVTCVVVDISKDDPEVQFSWFVDDVEVHTAQTQPREEQFNSTFRSVSELPIMHQDWLNGKEFKCRVNSAAFPAPIEKTISKTKGRPKAPQVYTIPPPKEQMAKDKVSLTCMITDFFPEDITVEWQWNGQPAENYKNTQPIMDTDGSYFVYSKLNVQKSNWEAGNTFTCSVLHEGLHNHHTEKSLSHSPGK

SEQ ID NO: 819 - protein, 613 aa, Artificial Sequence
  Synthetic
APTSSSTSSSTAEAQQQQQQQQQQQQHLEQLLMDLQELLSRMENYRNLKLPRMLTFKFYLPKQATELKDLQCLEDELGPLRHVLDLTQSKSFQLEDAENFISNIRVTVVKLKGSDNTFECQFDDESATVVDFLRRWIAFCQSIISTSPQSLHERHLNNNGPLGVRGGGGGSGGGGSELCLYDPPEVPNATFKALSYKNGTILNCECKRGFRRLKELVYMRCLGNSWSSNCQCTSNSHDKSRKQVTAQLEHQKEQQTTTDMQKPTQSMHQENLTGHCREPPPWKHEDSKRIYHFVEGQSVHYECIPGYKALQRGPAISICKMKCGKTGWTQPQLTCVDEREHHRFLASEESQGSRNSSPESETSCPITTTDFPQPTETTAMTETFVLTMEYKGCKPCICTVPEVSSVFIFPPKPKDVLTITLTPKVTCVVVDISKDDPEVQFSWFVDDVEVHTAQTQPREEQFNSTFRSVSELPIMHQDWLNGKEFKCRVNSAAFPAPIEKTISKTKGRPKAPQVYTIPPPKEQMAKDKVSLTCMITDFFPEDITVEWQWNGQPAENYKNTQPIMDTDGSYFVYSKLNVQKSNWEAGNTFTCSVLHEGLHNHHTEKSLSHSPGK

SEQ ID NO: 820 - protein, 613 aa, Artificial Sequence
  Synthetic
APTSSSTSSSTAEAQQQQQQQQQQQQHLEQLLMDLQELLSRMENYRNLKLPRMLTFKFYLPKQATELKDLQCLEDELGPLRHVLDLTQSKSFQLEDAENFISNIRVTVVKLKGSDNTFECQFDDESATVVDFLRRWIAFCQSIISTSPQSLHERHLNNNGVRLGPGGGGGSGGGGSELCLYDPPEVPNATFKALSYKNGTILNCECKRGFRRLKELVYMRCLGNSWSSNCQCTSNSHDKSRKQVTAQLEHQKEQQTTTDMQKPTQSMHQENLTGHCREPPPWKHEDSKRIYHFVEGQSVHYECIPGYKALQRGPAISICKMKCGKTGWTQPQLTCVDEREHHRFLASEESQGSRNSSPESETSCPITTTDFPQPTETTAMTETFVLTMEYKGCKPCICTVPEVSSVFIFPPKPKDVLTITLTPKVTCVVVDISKDDPEVQFSWFVDDVEVHTAQTQPREEQFNSTFRSVSELPIMHQDWLNGKEFKCRVNSAAFPAPIEKTISKTKGRPKAPQVYTIPPPKEQMAKDKVSLTCMITDFFPEDITVEWQWNGQPAENYKNTQPIMDTDGSYFVYSKLNVQKSNWEAGNTFTCSVLHEGLHNHHTEKSLSHSPGK

SEQ ID NO: 821 - protein, 616 aa, Artificial Sequence
  Synthetic
APTSSSTSSSTAEAQQQQQQQQQQQQHLEQLLMDLQELLSRMENYRNLKLPRMLTFKFYLPKQATELKDLQCLEDELGPLRHVLDLTQSKSFQLEDAENFISNIRVTVVKLKGSDNTFECQFDDESATVVDFLRRWIAFCQSIISTSPQVRIQRKKEKMKETGVRLGPGGGGGSGGGGSELCLYDPPEVPNATFKALSYKNGTILNCECKRGFRRLKELVYMRCLGNSWSSNCQCTSNSHDKSRKQVTAQLEHQKEQQTTTDMQKPTQSMHQENLTGHCREPPPWKHEDSKRIYHFVEGQSVHYECIPGYKALQRGPAISICKMKCGKTGWTQPQLTCVDEREHHRFLASEESQGSRNSSPESETSCPITTTDFPQPTETTAMTETFVLTMEYKGCKPCICTVPEVSSVFIFPPKPKDVLTITLTPKVTCVVVDISKDDPEVQFSWFVDDVEVHTAQTQPREEQFNSTFRSVSELPIMHQDWLNGKEFKCRVNSAAFPAPIEKTISKTKGRPKAPQVYTIPPPKEQMAKDKVSLTCMITDFFPEDITVEWQWNGQPAENYKNTQPIMDTDGSYFVYSKLNVQKSNWEAGNTFTCSVLHEGLHNHHTEKSLSHSPGK

SEQ ID NO: 822 - protein, 613 aa, Artificial Sequence
  Synthetic
APTSSSTSSSTAEAQQQQQQQQQQQQHLEQLLMDLQELLSRMENYRNLKLPRMLTFKFYLPKQATELKDLQCLEDELGPLRHVLDLTQSKSFQLEDAENFISNIRVTVVKLKGSDNTFECQFDDESATVVDFLRRWIAFCQSIISTSPQSGGGGSGGGGGPLGVRGFHRRIKAGGSELCLYDPPEVPNATFKALSYKNGTILNCECKRGFRRLKELVYMRCLGNSWSSNCQCTSNSHDKSRKQVTAQLEHQKEQQTTTDMQKPTQSMHQENLTGHCREPPPWKHEDSKRIYHFVEGQSVHYECIPGYKALQRGPAISICKMKCGKTGWTQPQLTCVDEREHHRFLASEESQGSRNSSPESETSCPITTTDFPQPTETTAMTETFVLTMEYKGCKPCICTVPEVSSVFIFPPKPKDVLTITLTPKVTCVVVDISKDDPEVQFSWFVDDVEVHTAQTQPREEQFNSTFRSVSELPIMHQDWLNGKEFKCRVNSAAFPAPIEKTISKTKGRPKAPQVYTIPPPKEQMAKDKVSLTCMITDFFPEDITVEWQWNGQPAENYKNTQPIMDTDGSYFVYSKLNVQKSNWEAGNTFTCSVLHEGLHNHHTEKSLSHSPGK

SEQ ID NO: 823 - protein, 613 aa, Artificial Sequence
  Synthetic
APTSSSTSSSTAEAQQQQQQQQQQQQHLEQLLMDLQELLSRMENYRNLKLPRMLTFKFYLPKQATELKDLQCLEDELGPLRHVLDLTQSKSFQLEDAENFISNIRVTVVKLKGSDNTFECQFDDESATVVDFLRRWIAFCQSIISTSPQSGGGGSGGGGGVRLGPGFHRRIKAGGSELCLYDPPEVPNATFKALSYKNGTILNCECKRGFRRLKELVYMRCLGNSWSSNCQCTSNSHDKSRKQVTAQLEHQKEQQTTTDMQKPTQSMHQENLTGHCREPPPWKHEDSKRIYHFVEGQSVHYECIPGYKALQRGPAISICKMKCGKTGWTQPQLTCVDEREHHRFLASEESQGSRNSSPESETSCPITTTDFPQPTETTAMTETFVLTMEYKGCKPCICTVPEVSSVFIFPPKPKDVLTITLTPKVTCVVVDISKDDPEVQFSWFVDDVEVHTAQTQPREEQFNSTFRSVSELPIMHQDWLNGKEFKCRVNSAAFPAPIEKTISKTKGRPKAPQVYTIPPPKEQMAKDKVSLTCMITDFFPEDITVEWQWNGQPAENYKNTQPIMDTDGSYFVYSKLNVQKSNWEAGNTFTCSVLHEGLHNHHTEKSLSHSPGK

SEQ ID NO: 824 - protein, 613 aa, Artificial Sequence
  Synthetic
APTSSSTSSSTAEAQQQQQQQQQQQQHLEQLLMDLQELLSRMENYRNLKLPRMLTFKFYLPKQATELKDLQCLEDELGPLRHVLDLTQSKSFQLEDAENFISNIRVTVVKLKGSDNTFECQFDDESATVVDFLRRWIAFCQSIISTSPQSGGGGSGGGGGPLGVRGGHHPHGHHPHELCLYDPPEVPNATFKALSYKNGTILNCECKRGFRRLKELVYMRCLGNSWSSNCQCTSNSHDKSRKQVTAQLEHQKEQQTTTDMQKPTQSMHQENLTGHCREPPPWKHEDSKRIYHFVEGQSVHYECIPGYKALQRGPAISICKMKCGKTGWTQPQLTCVDEREHHRFLASEESQGSRNSSPESETSCPITTTDFPQPTETTAMTETFVLTMEYKGCKPCICTVPEVSSVFIFPPKPKDVLTITLTPKVTCVVVDISKDDPEVQFSWFVDDVEVHTAQTQPREEQFNSTFRSVSELPIMHQDWLNGKEFKCRVNSAAFPAPIEKTISKTKGRPKAPQVYTIPPPKEQMAKDKVSLTCMITDFFPEDITVEWQWNGQPAENYKNTQPIMDTDGSYFVYSKLNVQKSNWEAGNTFTCSVLHEGLHNHHTEKSLSHSPGK

SEQ ID NO: 825 - protein, 613 aa, Artificial Sequence
  Synthetic
APTSSSTSSSTAEAQQQQQQQQQQQQHLEQLLMDLQELLSRMENYRNLKLPRMLTFKFYLPKQATELKDLQCLEDELGPLRHVLDLTQSKSFQLEDAENFISNIRVTVVKLKGSDNTFECQFDDESATVVDFLRRWIAFCQSIISTSPQSGGGGSGGGGGVRLGPGGHHPHGHHPHELCLYDPPEVPNATFKALSYKNGTILNCECKRGFRRLKELVYMRCLGNSWSSNCQCTSNSHDKSRKQVTAQLEHQKEQQTTTDMQKPTQSMHQENLTGHCREPPPWKHEDSKRIYHFVEGQSVHYECIPGYKALQRGPAISICKMKCGKTGWTQPQLTCVDEREHHRFLASEESQGSRNSSPESETSCPITTTDFPQPTETTAMTETFVLTMEYKGCKPCICTVPEVSSVFIFPPKPKDVLTITLTPKVTCVVVDISKDDPEVQFSWFVDDVEVHTAQTQPREEQFNSTFRSVSELPIMHQDWLNGKEFKCRVNSAAFPAPIEKTISKTKGRPKAPQVYTIPPPKEQMAKDKVSLTCMITDFFPEDITVEWQWNGQPAENYKNTQPIMDTDGSYFVYSKLNVQKSNWEAGNTFTCSVLHEGLHNHHTEKSLSHSPGK

SEQ ID NO: 826 - protein, 612 aa, Artificial Sequence
  Synthetic
APTSSSTSSSTAEAQQQQQQQQQQQQHLEQLLMDLQELLSRMENYRNLKLPRMLTFKFYLPKQATELKDLQCLEDELGPLRHVLDLTQSKSFQLEDAENFISNIRVTVVKLKGSDNTFECQFDDESATVVDFLRRWIAFCQSIISTSPQSGGGGSGGGGGPLGVRGGGWSHWGGSELCLYDPPEVPNATFKALSYKNGTILNCECKRGFRRLKELVYMRCLGNSWSSNCQCTSNSHDKSRKQVTAQLEHQKEQQTTTDMQKPTQSMHQENLTGHCREPPPWKHEDSKRIYHFVEGQSVHYECIPGYKALQRGPAISICKMKCGKTGWTQPQLTCVDEREHHRFLASEESQGSRNSSPESETSCPITTTDFPQPTETTAMTETFVLTMEYKGCKPCICTVPEVSSVFIFPPKPKDVLTITLTPKVTCVVVDISKDDPEVQFSWFVDDVEVHTAQTQPREEQFNSTFRSVSELPIMHQDWLNGKEFKCRVNSAAFPAPIEKTISKTKGRPKAPQVYTIPPPKEQMAKDKVSLTCMITDFFPEDITVEWQWNGQPAENYKNTQPIMDTDGSYFVYSKLNVQKSNWEAGNTFTCSVLHEGLHNHHTEKSLSHSPGK

SEQ ID NO: 827 - protein, 612 aa, Artificial Sequence
  Synthetic
APTSSSTSSSTAEAQQQQQQQQQQQQHLEQLLMDLQELLSRMENYRNLKLPRMLTFKFYLPKQATELKDLQCLEDELGPLRHVLDLTQSKSFQLEDAENFISNIRVTVVKLKGSDNTFECQFDDESATVVDFLRRWIAFCQSIISTSPQSGGGGSGGGGGVRLGPGGGWSHWGGSELCLYDPPEVPNATFKALSYKNGTILNCECKRGFRRLKELVYMRCLGNSWSSNCQCTSNSHDKSRKQVTAQLEHQKEQQTTTDMQKPTQSMHQENLTGHCREPPPWKHEDSKRIYHFVEGQSVHYECIPGYKALQRGPAISICKMKCGKTGWTQPQLTCVDEREHHRFLASEESQGSRNSSPESETSCPITTTDFPQPTETTAMTETFVLTMEYKGCKPCICTVPEVSSVFIFPPKPKDVLTITLTPKVTCVVVDISKDDPEVQFSWFVDDVEVHTAQTQPREEQFNSTFRSVSELPIMHQDWLNGKEFKCRVNSAAFPAPIEKTISKTKGRPKAPQVYTIPPPKEQMAKDKVSLTCMITDFFPEDITVEWQWNGQPAENYKNTQPIMDTDGSYFVYSKLNVQKSNWEAGNTFTCSVLHEGLHNHHTEKSLSHSPGK

SEQ ID NO: 828 - protein, 632 aa, Artificial Sequence
  Synthetic
MGWSCIILFLVATATGVHSAPTSSSTSSSTAEAQQQQQQQQQQQQHLEQLLMDLQELLSRMENYRNLKLPRMLTFKFYLPKQATELKDLQCLEDELGPLRHVLDLTQSKSFQLEDAENFISNIRVTVVKLKGSDNTFECQFDDESATVVDFLRRWIAFCQSIISTSPQSGGGGSGGGGGPLGVRGKLWVLPKGGSELCLYDPPEVPNATFKALSYKNGTILNCECKRGFRRLKELVYMRCLGNSWSSNCQCTSNSHDKSRKQVTAQLEHQKEQQTTTDMQKPTQSMHQENLTGHCREPPPWKHEDSKRIYHFVEGQSVHYECIPGYKALQRGPAISICKMKCGKTGWTQPQLTCVDEREHHRFLASEESQGSRNSSPESETSCPITTTDFPQPTETTAMTETFVLTMEYKGCKPCICTVPEVSSVFIFPPKPKDVLTITLTPKVTCVVVDISKDDPEVQFSWFVDDVEVHTAQTQPREEQFNSTFRSVSELPIMHQDWLNGKEFKCRVNSAAFPAPIEKTISKTKGRPKAPQVYTIPPPKEQMAKDKVSLTCMITDFFPEDITVEWQWNGQPAENYKNTQPIMDTDGSYFVYSKLNVQKSNWEAGNTFTCSVLHEGLHNHHTEKSLSHSPGK

SEQ ID NO: 829 - protein, 632 aa, Artificial Sequence
  Synthetic
MGWSCIILFLVATATGVHSAPTSSSTSSSTAEAQQQQQQQQQQQQHLEQLLMDLQELLSRMENYRNLKLPRMLTFKFYLPKQATELKDLQCLEDELGPLRHVLDLTQSKSFQLEDAENFISNIRVTVVKLKGSDNTFECQFDDESATVVDFLRRWIAFCQSIISTSPQSGGGGSGGGGGVRLGPGKLWVLPKGGSELCLYDPPEVPNATFKALSYKNGTILNCECKRGFRRLKELVYMRCLGNSWSSNCQCTSNSHDKSRKQVTAQLEHQKEQQTTTDMQKPTQSMHQENLTGHCREPPPWKHEDSKRIYHFVEGQSVHYECIPGYKALQRGPAISICKMKCGKTGWTQPQLTCVDEREHHRFLASEESQGSRNSSPESETSCPITTTDFPQPTETTAMTETFVLTMEYKGCKPCICTVPEVSSVFIFPPKPKDVLTITLTPKVTCVVVDISKDDPEVQFSWFVDDVEVHTAQTQPREEQFNSTFRSVSELPIMHQDWLNGKEFKCRVNSAAFPAPIEKTISKTKGRPKAPQVYTIPPPKEQMAKDKVSLTCMITDFFPEDITVEWQWNGQPAENYKNTQPIMDTDGSYFVYSKLNVQKSNWEAGNTFTCSVLHEGLHNHHTEKSLSHSPGK

SEQ ID NO: 830 - protein, 632 aa, Artificial Sequence
  Synthetic
MGWSCIILFLVATATGVHSAPTSSSTSSSTAEAQQQQQQQQQQQQHLEQLLMDLQELLSRMENYRNLKLPRMLTFKFYLPKQATELKDLQCLEDELGPLRHVLDLTQSKSFQLEDAENFISNIRVTVVKLKGSDNTFECQFDDESATVVDFLRRWIAFCQSIISTSPQSGGGGSGGGGGPLGVRGLHERHLNNNGELCLYDPPEVPNATFKALSYKNGTILNCECKRGFRRLKELVYMRCLGNSWSSNCQCTSNSHDKSRKQVTAQLEHQKEQQTTTDMQKPTQSMHQENLTGHCREPPPWKHEDSKRIYHFVEGQSVHYECIPGYKALQRGPAISICKMKCGKTGWTQPQLTCVDEREHHRFLASEESQGSRNSSPESETSCPITTTDFPQPTETTAMTETFVLTMEYKGCKPCICTVPEVSSVFIFPPKPKDVLTITLTPKVTCVVVDISKDDPEVQFSWFVDDVEVHTAQTQPREEQFNSTFRSVSELPIMHQDWLNGKEFKCRVNSAAFPAPIEKTISKTKGRPKAPQVYTIPPPKEQMAKDKVSLTCMITDFFPEDITVEWQWNGQPAENYKNTQPIMDTDGSYFVYSKLNVQKSNWEAGNTFTCSVLHEGLHNHHTEKSLSHSPGK

SEQ ID NO: 831 - protein, 632 aa, Artificial Sequence
  Synthetic
MGWSCIILFLVATATGVHSAPTSSSTSSSTAEAQQQQQQQQQQQQHLEQLLMDLQELLSRMENYRNLKLPRMLTFKFYLPKQATELKDLQCLEDELGPLRHVLDLTQSKSFQLEDAENFISNIRVTVVKLKGSDNTFECQFDDESATVVDFLRRWIAFCQSIISTSPQSGGGGSGGGGGVRLGPGLHERHLNNNGELCLYDPPEVPNATFKALSYKNGTILNCECKRGFRRLKELVYMRCLGNSWSSNCQCTSNSHDKSRKQVTAQLEHQKEQQTTTDMQKPTQSMHQENLTGHCREPPPWKHEDSKRIYHFVEGQSVHYECIPGYKALQRGPAISICKMKCGKTGWTQPQLTCVDEREHHRFLASEESQGSRNSSPESETSCPITTTDFPQPTETTAMTETFVLTMEYKGCKPCICTVPEVSSVFIFPPKPKDVLTITLTPKVTCVVVDISKDDPEVQFSWFVDDVEVHTAQTQPREEQFNSTFRSVSELPIMHQDWLNGKEFKCRVNSAAFPAPIEKTISKTKGRPKAPQVYTIPPPKEQMAKDKVSLTCMITDFFPEDITVEWQWNGQPAENYKNTQPIMDTDGSYFVYSKLNVQKSNWEAGNTFTCSVLHEGLHNHHTEKSLSHSPGK

SEQ ID NO: 832 - protein, 632 aa, Artificial Sequence
  Synthetic
MGWSCIILFLVATATGVHSAPTSSSTSSSTAEAQQQQQQQQQQQQHLEQLLMDLQELLSRMENYRNLKLPRMLTFKFYLPKQATELKDLQCLEDELGPLRHVLDLTQSKSFQLEDAENFISNIRVTVVKLKGSDNTFECQFDDESATVVDFLRRWIAFCQSIISTSPQSGGGGGHHPHGPLGVRGGGGGSGGGGSELCLYDPPEVPNATFKALSYKNGTILNCECKRGFRRLKELVYMRCLGNSWSSNCQCTSNSHDKSRKQVTAQLEHQKEQQTTTDMQKPTQSMHQENLTGHCREPPPWKHEDSKRIYHFVEGQSVHYECIPGYKALQRGPAISICKMKCGKTGWTQPQLTCVDEREHHRFLASEESQGSRNSSPESETSCPITTTDFPQPTETTAMTETFVLTMEYKGCKPCICTVPEVSSVFIFPPKPKDVLTITLTPKVTCVVVDISKDDPEVQFSWFVDDVEVHTAQTQPREEQFNSTFRSVSELPIMHQDWLNGKEFKCRVNSAAFPAPIEKTISKTKGRPKAPQVYTIPPPKEQMAKDKVSLTCMITDFFPEDITVEWQWNGQPAENYKNTQPIMDTDGSYFVYSKLNVQKSNWEAGNTFTCSVLHEGLHNHHTEKSLSHSPGK

SEQ ID NO: 833 - protein, 632 aa, Artificial Sequence
  Synthetic
MGWSCIILFLVATATGVHSAPTSSSTSSSTAEAQQQQQQQQQQQQHLEQLLMDLQELLSRMENYRNLKLPRMLTFKFYLPKQATELKDLQCLEDELGPLRHVLDLTQSKSFQLEDAENFISNIRVTVVKLKGSDNTFECQFDDESATVVDFLRRWIAFCQSIISTSPQGHHPHSGGGGGPLGVRGGGGGSGGGGSELCLYDPPEVPNATFKALSYKNGTILNCECKRGFRRLKELVYMRCLGNSWSSNCQCTSNSHDKSRKQVTAQLEHQKEQQTTTDMQKPTQSMHQENLTGHCREPPPWKHEDSKRIYHFVEGQSVHYECIPGYKALQRGPAISICKMKCGKTGWTQPQLTCVDEREHHRFLASEESQGSRNSSPESETSCPITTTDFPQPTETTAMTETFVLTMEYKGCKPCICTVPEVSSVFIFPPKPKDVLTITLTPKVTCVVVDISKDDPEVQFSWFVDDVEVHTAQTQPREEQFNSTFRSVSELPIMHQDWLNGKEFKCRVNSAAFPAPIEKTISKTKGRPKAPQVYTIPPPKEQMAKDKVSLTCMITDFFPEDITVEWQWNGQPAENYKNTQPIMDTDGSYFVYSKLNVQKSNWEAGNTFTCSVLHEGLHNHHTEKSLSHSPGK

SEQ ID NO: 834 - protein, 632 aa, Artificial Sequence
  Synthetic
MGWSCIILFLVATATGVHSAPTSSSTSSSTAEAQQQQQQQQQQQQHLEQLLMDLQELLSRMENYRNLKLPRMLTFKFYLPKQATELKDLQCLEDELGPLRHVLDLTQSKSFQLEDAENFISNIRVTVVKLKGSDNTFECQFDDESATVVDFLRRWIAFCQSIISTSPQSGGGGSGGGGGPLGVRGGHHPHGGGGSELCLYDPPEVPNATFKALSYKNGTILNCECKRGFRRLKELVYMRCLGNSWSSNCQCTSNSHDKSRKQVTAQLEHQKEQQTTTDMQKPTQSMHQENLTGHCREPPPWKHEDSKRIYHFVEGQSVHYECIPGYKALQRGPAISICKMKCGKTGWTQPQLTCVDEREHHRFLASEESQGSRNSSPESETSCPITTTDFPQPTETTAMTETFVLTMEYKGCKPCICTVPEVSSVFIFPPKPKDVLTITLTPKVTCVVVDISKDDPEVQFSWFVDDVEVHTAQTQPREEQFNSTFRSVSELPIMHQDWLNGKEFKCRVNSAAFPAPIEKTISKTKGRPKAPQVYTIPPPKEQMAKDKVSLTCMITDFFPEDITVEWQWNGQPAENYKNTQPIMDTDGSYFVYSKLNVQKSNWEAGNTFTCSVLHEGLHNHHTEKSLSHSPGK

SEQ ID NO: 835 - protein, 642 aa, Artificial Sequence
  Synthetic
MGWSCIILFLVATATGVHSAPTSSSTSSSTAEAQQQQQQQQQQQQHLEQLLMDLQELLSRMENYRNLKLPRMLTFKFYLPKQATELKDLQCLEDELGPLRHVLDLTQSKSFQLEDAENFISNIRVTVVKLKGSDNTFECQFDDESATVVDFLRRWIAFCQSIISTSPQSGGGGSGGGGGPLGVRGGGGGSGGGGSELCLYDPPEVPNATFKALSYKNGTILNCECKRGFRRLKELVYMRCLGNSWSSNCQCTSNSHDKSRKQVTAQLEHQKEQQTTTDMQKPTQSMHQENLTGHCREPPPWKHEDSKRIYHFVEGQSVHYECIPGYKALQRGPAISICKMKCGKTGWTQPQLTCVDEREHHRFLASEESQGSRNSSPESETSCPITTTDFPQPTETTAMTETFVLTMEYKGCKPCICTVPEVSSVFIFPPKPKDVLTITLTPKVTCVVVDISKDDPEVQFSWFVDDVEVHTAQTQPREEQFNSTFRSVSELPIMHQDWLNGKEFKCRVNSAAFPAPIEKTISKTKGRPKAPQVYTIPPPKEQMAKDKVSLTCMITDFFPEDITVEWQWNGQPAENYKNTQPIMDTDGSYFVYSKLNVQKSNWEAGNTFTCSVLHEGLHNHHTEKSLSHSPGKGHHPHGHHPH

SEQ ID NO: 836 - protein, 637 aa, Artificial Sequence
  Synthetic
MGWSCIILFLVATATGVHSAPTSSSTSSSTAEAQQQQQQQQQQQQHLEQLLMDLQELLSRMENYRNLKLPRMLTFKFYLPKQATELKDLQCLEDELGPLRHVLDLTQSKSFQLEDAENFISNIRVTVVKLKGSDNTFECQFDDESATVVDFLRRWIAFCQSIISTSPQSGGGGSGGGGGPLGVRGGGGGSGGGGSELCLYDPPEVPNATFKALSYKNGTILNCECKRGFRRLKELVYMRCLGNSWSSNCQCTSNSHDKSRKQVTAQLEHQKEQQTTTDMQKPTQSMHQENLTGHCREPPPWKHEDSKRIYHFVEGQSVHYECIPGYKALQRGPAISICKMKCGKTGWTQPQLTCVDEREHHRFLASEESQGSRNSSPESETSCPITTTDFPQPTETTAMTETFVLTMEYKGCKPCICTVPEVSSVFIFPPKPKDVLTITLTPKVTCVVVDISKDDPEVQFSWFVDDVEVHTAQTQPREEQFNSTFRSVSELPIMHQDWLNGKEFKCRVNSAAFPAPIEKTISKTKGRPKAPQVYTIPPPKEQMAKDKVSLTCMITDFFPEDITVEWQWNGQPAENYKNTQPIMDTDGSYFVYSKLNVQKSNWEAGNTFTCSVLHEGLHNHHTEKSLSHSPGKGHHPH

SEQ ID NO: 837 - protein, 611 aa, Artificial Sequence
  Synthetic
APTSSSTKKTQLQLEHLLLDLQMILNGINNYKNPKLTRMLTFKFYMPKKATELKHLQCLEEELKPLEEVLNLAQSKNFHLRPRDLISNINVIVLELKGSETTFMCEYADETATIVEFLNRWITFSQSIISTLTSGGGGSGGGGGPLGVRGGGGGSGGGGSELCDDDPPEIPHATFKAMAYKEGTILNCECKRGFRRIKSGSLYMLCTGNSSHSSWDNQCQCTSSATRNTTKQVTPQPEEQKERKTTEMQSPMQPVDQASLPGHCREPPPWENEATERIYHFVVGQMVYYQCVQGYRALHRGPAESVCKMTHGKTRWTQPQLICTGEMETSQFPGEEKPQASPEGRPESETSCLVTTTDFQIQTEMAATMETSIFTTEYQDKTHTCPPCPAPELLGGPSVFLFPPKPKDTLMISRTPEVTCVVVDVSHEDPEVKFNWYVDGVEVHNAKTKPREEQYNSTYRVVSVLTVLHQDWLNGKEYKCKVSNKALPAPIEKTISKAKGQPREPQVYTLPPSRDELTKNQVSLTCLVKGFYPSDIAVEWESNGQPENNYKTTPPVLDSDGSFFLYSKLTVDKSRWQQGNVFSCSVMHEALHNHYTQKSLSLSPGHHHHHH

SEQ ID NO: 838 - protein, 611 aa, Artificial Sequence
  Synthetic
APTSSSTKKTQLQLEHLLLDLQMILNGINNYKNPKLTRMLTFKFYMPKKATELKHLQCLEEELKPLEEVLNLAQSKNFHLRPRDLISNINVIVLELKGSETTFMCEYADETATIVEFLNRWITFSQSIISTLTSGGGGSGGGGGPLGVRGGGGGSGGGGSELCDDDPPEIPHATFKAMAYKEGTMLNCECKRGFRRIKSGSVYMLCTGNSSHSSWDNQCQCTSSATRNTTKQVTPQPEEQKERKTTEMQSPMQPVDQASLPGHCREPPPWENEATERIYHFVVGQMVYYQCVQGYRALHRGPAESVCKMTHGKTRWTQPQLICTGEMETSQFPGEEKPQASPEGRPESETSCLVTTTDFQIQTEMAATMETSIFTTEYQDKTHTCPPCPAPELLGGPSVFLFPPKPKDTLMISRTPEVTCVVVDVSHEDPEVKFNWYVDGVEVHNAKTKPREEQYNSTYRVVSVLTVLHQDWLNGKEYKCKVSNKALPAPIEKTISKAKGQPREPQVYTLPPSRDELTKNQVSLTCLVKGFYPSDIAVEWESNGQPENNYKTTPPVLDSDGSFFLYSKLTVDKSRWQQGNVFSCSVMHEALHNHYTQKSLSLSPGHHHHHH

SEQ ID NO: 839 - protein, 611 aa, Artificial Sequence
  Synthetic
APTSSSTKKTQLQLEHLLLDLQMILNGINNYKNPKLTRMLTFKFYMPKKATELKHLQCLEEELKPLEEVLNLAQSKNFHLRPRDLISNINVIVLELKGSETTFMCEYADETATIVEFLNRWITFSQSIISTLTSGGGGSGGGGGPLGVRGGGGGSGGGGSELCLYDPPEIPHATFKAMAYKEGTMLNCECKRGFRRIKSGSLYMLCTGNSSHSSWDNQCQCTSSATRNTTKQVTPQPEEQKERKTTEMQSPMQPVDQASLPGHCREPPPWENEATERIYHFVVGQMVYYQCVQGYRALHRGPAESVCKMTHGKTRWTQPQLICTGEMETSQFPGEEKPQASPEGRPESETSCLVTTTDFQIQTEMAATMETSIFTTEYQDKTHTCPPCPAPELLGGPSVFLFPPKPKDTLMISRTPEVTCVVVDVSHEDPEVKFNWYVDGVEVHNAKTKPREEQYNSTYRVVSVLTVLHQDWLNGKEYKCKVSNKALPAPIEKTISKAKGQPREPQVYTLPPSRDELTKNQVSLTCLVKGFYPSDIAVEWESNGQPENNYKTTPPVLDSDGSFFLYSKLTVDKSRWQQGNVFSCSVMHEALHNHYTQKSLSLSPGHHHHHH

SEQ ID NO: 840 - protein, 610 aa, Artificial Sequence
  Synthetic
APTSSSTKKTQLQLEHLLLDLQMILNGINNYKNPKLTRMLTFKFYMPKKATELKHLQCLEEELKPLEEVLNLAQSKNFHLRPRDLISNINVIVLELKGSETTFMCEYADETATIVEFLNRWITFSQSIISTLTSGGGGSGGGGGPLGVRGGGGGSGGGGSELCDDDPPEIPHATFKAMAYKEGTMLNCECKRGFRRIKELVYMLCTGNSSHSSWDNQCQCTSSATRNTTKQVTPQPEEQKERKTTEMQSPMQPVDQASLPGHCREPPPWENEATERIYHFVVGQMVYYQCVQGYRALHRGPAESVCKMTHGKTRWTQPQLICTGEMETSQFPGEEKPQASPEGRPESETSCLVTTTDFQIQTEMAATMETSIFTTEYQDKTHTCPPCPAPELLGGPSVFLFPPKPKDTLMISRTPEVTCVVVDVSHEDPEVKFNWYVDGVEVHNAKTKPREEQYNSTYRVVSVLTVLHQDWLNGKEYKCKVSNKALPAPIEKTISKAKGQPREPQVYTLPPSRDELTKNQVSLTCLVKGFYPSDIAVEWESNGQPENNYKTTPPVLDSDGSFFLYSKLTVDKSRWQQGNVFSCSVMHEALHNHYTQKSLSLSPGHHHHHH

SEQ ID NO: 841 - protein, 578 aa, Artificial Sequence
  Synthetic
APTSSSTKKTQLQLEHLLLDLQMILNGINNYKNPKLTRMLTFKFYMPKKATELKHLQCLEEELKPLEEVLNLAQSKNFHLRPRDLISNINVIVLELKGSETTFMCEYADETATIVEFLNRWITFSQSIISTLTSGGGGSGGGGGPLGVRGGGGGSGGGGSELCDDDPPEIPHATFKAMAYKEGTMLNCECKRGFRRIKSGSLYMLCTGNSSHSSWDNQCQCTSSATRNTTKQVTPQPEEQKERKTTEMQSPMQPVDQASLPGHCREPPPWENEATERIYHFVVGQMVYYQCVQGYRALHRGPAESVCKMTHGKTRWTQPQLICTGEMETSQFPGEEKPQASPEGRPESETSCDKTHTCPPCPAPELLGGPSVFLFPPKPKDTLMISRTPEVTCVVVDVSHEDPEVKFNWYVDGVEVHNAKTKPREEQYNSTYRVVSVLTVLHQDWLNGKEYKCKVSNKALPAPIEKTISKAKGQPREPQVYTLPPSRDELTKNQVSLTCLVKGFYPSDIAVEWESNGQPENNYKTTPPVLDSDGSFFLYSKLTVDKSRWQQGNVFSCSVMHEALHNHYTQKSLSLSPG

SEQ ID NO: 842 - protein, 584 aa, Artificial Sequence
  Synthetic
APTSSSTKKTQLQLEHLLLDLQMILNGINNYKNPKLTRMLTFKFYMPKKATELKHLQCLEEELKPLEEVLNLAQSKNFHLRPRDLISNINVIVLELKGSETTFMCEYADETATIVEFLNRWITFSQSIISTLTSGGGGSGGGGGPLGVRGGGGGSGGGGSELCDDDPPEIPHATFKAMAYKEGTMLNCECKRGFRRIKSGSLYMLCTGNSSHSSWDNQCQCTSSATRNTTKQVTPQPEEQKERKTTEMQSPMQPVDQASLPGHCREPPPWENEATERIYHFVVGQMVYYQCVQGYRALHRGPAESVCKMTHGKTRWTQPQLICTGEMETSQFPGEEKPQASPEGRPESETSCGSGGGGDKTHTCPPCPAPELLGGPSVFLFPPKPKDTLMISRTPEVTCVVVDVSHEDPEVKFNWYVDGVEVHNAKTKPREEQYNSTYRVVSVLTVLHQDWLNGKEYKCKVSNKALPAPIEKTISKAKGQPREPQVYTLPPSRDELTKNQVSLTCLVKGFYPSDIAVEWESNGQPENNYKTTPPVLDSDGSFFLYSKLTVDKSRWQQGNVFSCSVMHEALHNHYTQKSLSLSPG

SEQ ID NO: 843 - protein, 584 aa, Artificial Sequence
  Synthetic
APTSSSTKKTQLQLEHLLLDLQMILNGINNYKNPKLTRMLTFKFYMPKKATELKHLQCLEEELKPLEEVLNLAQSKNFHLRPRDLISNINVIVLELKGSETTFMCEYADETATIVEFLNRWITFSQSIISTLTSGGGGSGGGGGPLGVRGGGGGSGGGGSELCDDDPPEIPHATFKAMAYKEGTILNCECKRGFRRIKSGSLYMLCTGNSSHSSWDNQCQCTSSATRNTTKQVTPQPEEQKERKTTEMQSPMQPVDQASLPGHCREPPPWENEATERIYHFVVGQMVYYQCVQGYRALHRGPAESVCKMTHGKTRWTQPQLICTGEMETSQFPGEEKPQASPEGRPESETSCGSGGGGDKTHTCPPCPAPELLGGPSVFLFPPKPKDTLMISRTPEVTCVVVDVSHEDPEVKFNWYVDGVEVHNAKTKPREEQYNSTYRVVSVLTVLHQDWLNGKEYKCKVSNKALPAPIEKTISKAKGQPREPQVYTLPPSRDELTKNQVSLTCLVKGFYPSDIAVEWESNGQPENNYKTTPPVLDSDGSFFLYSKLTVDKSRWQQGNVFSCSVMHEALHNHYTQKSLSLSPG

SEQ ID NO: 844 - protein, 584 aa, Artificial Sequence
  Synthetic
APTSSSTKKTQLQLEHLLLDLQMILNGINNYKNPKLTRMLTFKFYMPKKATELKHLQCLEEELKPLEEVLNLAQSKNFHLRPRDLISNINVIVLELKGSETTFMCEYADETATIVEFLNRWITFSQSIISTLTSGGGGSGGGGGPLGVRGGGGGSGGGGSELCDDDPPEIPHATFKAMAYKEGTMLNCECKRGFRRIKSGSVYMLCTGNSSHSSWDNQCQCTSSATRNTTKQVTPQPEEQKERKTTEMQSPMQPVDQASLPGHCREPPPWENEATERIYHFVVGQMVYYQCVQGYRALHRGPAESVCKMTHGKTRWTQPQLICTGEMETSQFPGEEKPQASPEGRPESETSCGSGGGGDKTHTCPPCPAPELLGGPSVFLFPPKPKDTLMISRTPEVTCVVVDVSHEDPEVKFNWYVDGVEVHNAKTKPREEQYNSTYRVVSVLTVLHQDWLNGKEYKCKVSNKALPAPIEKTISKAKGQPREPQVYTLPPSRDELTKNQVSLTCLVKGFYPSDIAVEWESNGQPENNYKTTPPVLDSDGSFFLYSKLTVDKSRWQQGNVFSCSVMHEALHNHYTQKSLSLSPG

SEQ ID NO: 845 - protein, 584 aa, Artificial Sequence
  Synthetic
APTSSSTKKTQLQLEHLLLDLQMILNGINNYKNPKLTRMLTFKFYMPKKATELKHLQCLEEELKPLEEVLNLAQSKNFHLRPRDLISNINVIVLELKGSETTFMCEYADETATIVEFLNRWITFSQSIISTLTSGGGGSGGGGGPLGVRGGGGGSGGGGSELCLYDPPEIPHATFKAMAYKEGTMLNCECKRGFRRIKSGSLYMLCTGNSSHSSWDNQCQCTSSATRNTTKQVTPQPEEQKERKTTEMQSPMQPVDQASLPGHCREPPPWENEATERIYHFVVGQMVYYQCVQGYRALHRGPAESVCKMTHGKTRWTQPQLICTGEMETSQFPGEEKPQASPEGRPESETSCGSGGGGDKTHTCPPCPAPELLGGPSVFLFPPKPKDTLMISRTPEVTCVVVDVSHEDPEVKFNWYVDGVEVHNAKTKPREEQYNSTYRVVSVLTVLHQDWLNGKEYKCKVSNKALPAPIEKTISKAKGQPREPQVYTLPPSRDELTKNQVSLTCLVKGFYPSDIAVEWESNGQPENNYKTTPPVLDSDGSFFLYSKLTVDKSRWQQGNVFSCSVMHEALHNHYTQKSLSLSPG

SEQ ID NO: 846 - protein, 611 aa, Artificial Sequence
  Synthetic
APTSSSTKKTQLQLEHLLLDLQMILNGINNYKNPKLTRMLTFKFYMPKKATELKHLQCLEEELKPLEEVLNLAQSKNFHLRPRDLISNINVIVLELKGSETTFMCEYADETATIVEFLNRWITFSQSIISTLTSGGGGSGGGGGPLGVRGGGGGSGGGGSELCDDDPPEIPHATFKAMAYKEGTILNCECKRGFRRIKSGSLYMLCTGNSSHSSWDNQCQCTSSATRNTTKQVTPQPEEQKERKTTEMQSPMQPVDQASLPGHCREPPPWENEATERIYHFVVGQMVYYQCVQGYRALHRGPAESVCKMTHGKTRWTQPQLICTGEMETSQFPGEEKPQASPEGRPESETSCLVTTTDFQIQTEMAATMETSIFTTEYQGSGGGGDKTHTCPPCPAPEAAGGPSVFLFPPKPKDTLMISRTPEVTCVVVDVSHEDPEVKFNWYVDGVEVHNAKTKPREEQYNSTYRVVSVLTVLHQDWLNGKEYKCKVSNKALPAPIEKTISKAKGQPREPQVYTLPPSRDELTKNQVSLTCLVKGFYPSDIAVEWESNGQPENNYKTTPPVLDSDGSFFLYSKLTVDKSRWQQGNVFSCSVMHEALHNHYTQKSLSLSPG

SEQ ID NO: 847 - protein, 611 aa, Artificial Sequence
  Synthetic
APTSSSTKKTQLQLEHLLLDLQMILNGINNYKNPKLTRMLTFKFYMPKKATELKHLQCLEEELKPLEEVLNLAQSKNFHLRPRDLISNINVIVLELKGSETTFMCEYADETATIVEFLNRWITFSQSIISTLTSGGGGSGGGGGVRLGPGGGGGSGGGGSELCDDDPPEIPHATFKAMAYKEGTILNCECKRGFRRIKSGSLYMLCTGNSSHSSWDNQCQCTSSATRNTTKQVTPQPEEQKERKTTEMQSPMQPVDQASLPGHCREPPPWENEATERIYHFVVGQMVYYQCVQGYRALHRGPAESVCKMTHGKTRWTQPQLICTGEMETSQFPGEEKPQASPEGRPESETSCLVTTTDFQIQTEMAATMETSIFTTEYQGSGGGGDKTHTCPPCPAPEAAGGPSVFLFPPKPKDTLMISRTPEVTCVVVDVSHEDPEVKFNWYVDGVEVHNAKTKPREEQYNSTYRVVSVLTVLHQDWLNGKEYKCKVSNKALPAPIEKTISKAKGQPREPQVYTLPPSRDELTKNQVSLTCLVKGFYPSDIAVEWESNGQPENNYKTTPPVLDSDGSFFLYSKLTVDKSRWQQGNVFSCSVMHEALHNHYTQKSLSLSPG

SEQ ID NO: 848 - protein, 611 aa, Artificial Sequence
  Synthetic
APTSSSTKKTQLQLEHLLLDLQMILNGINNYKNPKLTRMLTFKFYMPKKATELKHLQCLEEELKPLEEVLNLAQSKNFHLRPRDLISNINVIVLELKGSETTFMCEYADETATIVEFLNRWITFSQSIISTLTGHHPHGHHPHGVRLGPGGGGGSGGGGSELCDDDPPEIPHATFKAMAYKEGTILNCECKRGFRRIKSGSLYMLCTGNSSHSSWDNQCQCTSSATRNTTKQVTPQPEEQKERKTTEMQSPMQPVDQASLPGHCREPPPWENEATERIYHFVVGQMVYYQCVQGYRALHRGPAESVCKMTHGKTRWTQPQLICTGEMETSQFPGEEKPQASPEGRPESETSCLVTTTDFQIQTEMAATMETSIFTTEYQGSGGGGDKTHTCPPCPAPEAAGGPSVFLFPPKPKDTLMISRTPEVTCVVVDVSHEDPEVKFNWYVDGVEVHNAKTKPREEQYNSTYRVVSVLTVLHQDWLNGKEYKCKVSNKALPAPIEKTISKAKGQPREPQVYTLPPSRDELTKNQVSLTCLVKGFYPSDIAVEWESNGQPENNYKTTPPVLDSDGSFFLYSKLTVDKSRWQQGNVFSCSVMHEALHNHYTQKSLSLSPG

SEQ ID NO: 849 - protein, 611 aa, Artificial Sequence
  Synthetic
APTSSSTKKTQLQLEHLLLDLQMILNGINNYKNPKLTRMLTFKFYMPKKATELKHLQCLEEELKPLEEVLNLAQSKNFHLRPRDLISNINVIVLELKGSETTFMCEYADETATIVEFLNRWITFSQSIISTLTGHHPHGHHPHGPLGVRGGGGGSGGGGSELCDDDPPEIPHATFKAMAYKEGTILNCECKRGFRRIKSGSLYMLCTGNSSHSSWDNQCQCTSSATRNTTKQVTPQPEEQKERKTTEMQSPMQPVDQASLPGHCREPPPWENEATERIYHFVVGQMVYYQCVQGYRALHRGPAESVCKMTHGKTRWTQPQLICTGEMETSQFPGEEKPQASPEGRPESETSCLVTTTDFQIQTEMAATMETSIFTTEYQGSGGGGDKTHTCPPCPAPEAAGGPSVFLFPPKPKDTLMISRTPEVTCVVVDVSHEDPEVKFNWYVDGVEVHNAKTKPREEQYNSTYRVVSVLTVLHQDWLNGKEYKCKVSNKALPAPIEKTISKAKGQPREPQVYTLPPSRDELTKNQVSLTCLVKGFYPSDIAVEWESNGQPENNYKTTPPVLDSDGSFFLYSKLTVDKSRWQQGNVFSCSVMHEALHNHYTQKSLSLSPG

SEQ ID NO: 850 - protein, 614 aa, Artificial Sequence
  Synthetic
APTSSSTKKTQLQLEHLLLDLQMILNGINNYKNPKLTRMLTFKFYMPKKATELKHLQCLEEELKPLEEVLNLAQSKNFHLRPRDLISNINVIVLELKGSETTFMCEYADETATIVEFLNRWITFSQSIISTLTVRIQRKKEKMKETGPLGVRGGGGGSGGGGSELCDDDPPEIPHATFKAMAYKEGTILNCECKRGFRRIKSGSLYMLCTGNSSHSSWDNQCQCTSSATRNTTKQVTPQPEEQKERKTTEMQSPMQPVDQASLPGHCREPPPWENEATERIYHFVVGQMVYYQCVQGYRALHRGPAESVCKMTHGKTRWTQPQLICTGEMETSQFPGEEKPQASPEGRPESETSCLVTTTDFQIQTEMAATMETSIFTTEYQGSGGGGDKTHTCPPCPAPEAAGGPSVFLFPPKPKDTLMISRTPEVTCVVVDVSHEDPEVKFNWYVDGVEVHNAKTKPREEQYNSTYRVVSVLTVLHQDWLNGKEYKCKVSNKALPAPIEKTISKAKGQPREPQVYTLPPSRDELTKNQVSLTCLVKGFYPSDIAVEWESNGQPENNYKTTPPVLDSDGSFFLYSKLTVDKSRWQQGNVFSCSVMHEALHNHYTQKSLSLSPG

SEQ ID NO: 851 - protein, 614 aa, Artificial Sequence; identical to SEQ ID NO: 850
  Synthetic

SEQ ID NO: 852 - protein, 613 aa, Artificial Sequence
  Synthetic
APTSSSTSSSTAEAQQQQQQQQQQQQHLEQLLMDLQELLSRMENYRNLKLPRMLTFKFYLPKQATELKDLQCLEDELGPLRHVLDLTQSKSFQLEDAENFISNIRVTVVKLKGSDNTFECQFDDESATVVDFLRRWIAFSQSIISTSPQSGGGGSGGGGGVRLGPGGGGGSGGGGSELCLYDPPEVPNATFKALSYKNGTILNCECKRGFRRLKELVYMRCLGNSWSSNCQCTSNSHDKSRKQVTAQLEHQKEQQTTTDMQKPTQSMHQENLTGHCREPPPWKHEDSKRIYHFVEGQSVHYECIPGYKALQRGPAISICKMKCGKTGWTQPQLTCVDEREHHRFLASEESQGSRNSSPESETSCPITTTDFPQPTETTAMTETFVLTMEYKGCKPCICTVPEVSSVFIFPPKPKDVLTITLTPKVTCVVVDISKDDPEVQFSWFVDDVEVHTAQTQPREEQFNSTFRSVSELPIMHQDWLNGKEFKCRVNSAAFPAPIEKTISKTKGRPKAPQVYTIPPPKEQMAKDKVSLTCMITDFFPEDITVEWQWNGQPAENYKNTQPIMDTDGSYFVYSKLNVQKSNWEAGNTFTCSVLHEGLHNHHTEKSLSHSPGK

SEQ ID NO: 853-900 - skipped (48 entries)

SEQ ID NO: 901 - protein, 14 aa, Artificial Sequence
  Synthetic
  misc_feature: Edans fluorophore conjugated to peptide at 3' end
GGGSGGGGPLGVRG

SEQ ID NO: 902 - protein, 14 aa, Artificial Sequence
  Synthetic
  misc_feature: Edans fluorophore conjugated to peptide at 3' end
GGGHHPHGPLGVRG

SEQ ID NO: 903 - protein, 14 aa, Artificial Sequence
  Synthetic
  misc_feature: Edans fluorophore conjugated to peptide at 3' end
GVRIQRKKEKMKET

SEQ ID NO: 904 - protein, 14 aa, Artificial Sequence
  Synthetic
  misc_feature: Edans fluorophore conjugated to peptide at 3' end
FHRRIKAGPLGVRG

SEQ ID NO: 905-906 - skipped (2 entries)

SEQ ID NO: 907 - protein, 14 aa, Artificial Sequence
  Synthetic
  misc_feature: Edans fluorophore conjugated to peptide at 3' end
GGGSGGGPAALIGG

SEQ ID NO: 908-912 - skipped (5 entries)

SEQ ID NO: 913 - protein, 14 aa, Artificial Sequence
  Synthetic
  misc_feature: Edans fluorophore conjugated to peptide at 3' end
GGGWSHWGPLGVRG

SEQ ID NO: 914 - protein, 14 aa, Artificial Sequence
  Synthetic
  misc_feature: Edans fluorophore conjugated to peptide at 3' end
KLWVLPKGPLGVRG

SEQ ID NO: 915 - protein, 14 aa, Artificial Sequence
  Synthetic
  misc_feature: Edans fluorophore conjugated to peptide at 3' end
GGGSGLHERHLNNN

We claim:

1. A protease-activated pro-cytokine comprising:
a cytokine polypeptide sequence;
a inhibitory polypeptide sequence capable of blocking an activity of the cytokine polypeptide sequence;
a linker between the cytokine polypeptide sequence and the inhibitory polypeptide sequence, the linker comprising a protease-cleavable polypeptide sequence; and
a targeting sequence, wherein the targeting sequence is configured to bind an extracellular matrix component, an integrin, or a syndecan; or is configured to bind, in a pH-sensitive manner, an extracellular matrix component, IgB (CD79b), an integrin, a cadherin, a heparan sulfate proteoglycan, a syndecan, or a fibronectin; or the targeting sequence comprises the sequence of any one of SEQ ID NOs: 180-662 or a variant having one or two mismatches relative to the sequence of any one of SEQ ID NOs: 180-662.

2. The protease-activated pro-cytokine of the immediately preceding claim, further comprising a pharmacokinetic modulator.

3. The protease-activated pro-cytokine of the immediately preceding claim, wherein the pharmacokinetic modulator comprises an immunoglobulin constant domain.

4. The protease-activated pro-cytokine of claim 2, wherein the pharmacokinetic modulator comprises an immunoglobulin Fc region.

5. The protease-activated pro-cytokine of the immediately preceding claim, wherein the immunoglobulin is a human immunoglobulin.

6. The protease-activated pro-cytokine of any one of claims 4-5, wherein the immunoglobulin is IgG.

7. The protease-activated pro-cytokine of the immediately preceding claim, wherein the IgG is IgG1, IgG2, IgG3, or IgG4.

8. The protease-activated pro-cytokine of claim 2, wherein the pharmacokinetic modulator comprises an albumin.

9. The protease-activated pro-cytokine of the immediately preceding claim, wherein the albumin is a serum albumin.

10. The protease-activated pro-cytokine of any one of claims 8-9, wherein the albumin is a human albumin.

11. The protease-activated pro-cytokine of claim 2, wherein the pharmacokinetic modulator comprises PEG.

12. The protease-activated pro-cytokine of claim 2, wherein the pharmacokinetic modulator comprises XTEN.

13. The protease-activated pro-cytokine of claim 2, wherein the pharmacokinetic modulator comprises CTP.

14. The protease-activated pro-cytokine of any one of claims 2-13, wherein the protease-cleavable polypeptide sequence is between the cytokine polypeptide sequence and the pharmacokinetic modulator.

15. The protease-activated pro-cytokine of any one of claims 2-13, wherein the pharmacokinetic modulator is between the cytokine polypeptide sequence and the protease-cleavable polypeptide sequence.

16. The protease-activated pro-cytokine of any one of the preceding claims, comprising a plurality of protease-cleavable polypeptide sequences.

17. The protease-activated pro-cytokine of the immediately preceding claim, wherein the cytokine polypeptide sequence is flanked by protease cleavable polypeptide sequences.

18. The protease-activated pro-cytokine of the immediately preceding claim, having the structure PM-CL-CY-CL-IN (from N- to C-terminus or from C- to N-terminus), where PM is the pharmacokinetic modulator, each CL independently is a protease-cleavable polypeptide sequence, CY is the cytokine polypeptide sequence, and IN is the inhibitory polypeptide sequence.

19. The protease-activated pro-cytokine of any one of the preceding claims, comprising the targeting sequence, wherein the targeting sequence is between the cytokine polypeptide sequence and the protease-cleavable polypeptide sequence or one of the protease-cleavable polypeptide sequences.

20. The protease-activated pro-cytokine of any one of the preceding claims, wherein the cytokine polypeptide sequence comprises a modification to prevent disulfide bond formation, and optionally otherwise comprises wild-type sequence.

21. The protease-activated pro-cytokine of any one of the preceding claims, wherein the cytokine polypeptide sequence has at least 80, 85, 90, 95, 97, 98, or 99 percent identity to the sequence of a wild-type cytokine polypeptide sequence or to a cytokine polypeptide sequence in Table 1.

22. The protease-activated pro-cytokine of the immediately preceding claim, wherein the cytokine polypeptide sequence is a wild-type cytokine polypeptide sequence.

23. The protease-activated pro-cytokine of any one of the preceding claims, wherein the cytokine polypeptide sequence is a monomeric cytokine, or wherein the cytokine polypeptide sequence is a dimeric cytokine polypeptide sequence comprising monomers that are associated covalently (optionally via a polypeptide linker) or noncovalently.

24. The protease-activated pro-cytokine of any one of the preceding claims, wherein the inhibitory polypeptide sequence comprises a cytokine-binding domain.

25. The protease-activated pro-cytokine of the immediately preceding claim, wherein the cytokine-binding domain is a cytokine-binding domain of a cytokine receptor or a cytokine-binding domain of a fibronectin.

26. The protease-activated pro-cytokine of claim 24, wherein the cytokine-binding domain is an immunoglobulin cytokine-binding domain.

27. The protease-activated pro-cytokine of the immediately preceding claim, wherein the immunoglobulin cytokine-binding domain comprises a light chain variable domain and a heavy chain variable domain that bind the cytokine.

28. The protease-activated pro-cytokine of any one of claims 26-27, wherein the immunoglobulin cytokine-binding domain is an scFv, Fab, or VHH.

29. The protease-activated pro-cytokine of any one of the preceding claims, wherein the protease-cleavable polypeptide sequence is recognized by a metalloprotease, a serine protease, a cysteine protease, an aspartate protease, a threonine protease, a glutamate protease, a gelatinase, an asparagine peptide lyase, a cathepsin, a kallikrein, a plasmin, a collagenase, a hK1, a hK10, a hK15, a stromelysin, a Factor Xa, a chymotrypsin-like protease, a trypsin-like protease, a elastase-like protease, a subtilisin-like protease, an actinidain, a bromelain, a calpain, a caspase, a Mir 1-CP, a papain, a HIV-1 protease, a HSV protease, a CMV protease, a chymosin, a renin, a pepsin, a matriptase, a legumain, a plasmepsin, a nepenthesin, a metalloexopeptidase, a metalloendopeptidase, an ADAM 10, an ADAM17, an ADAM 12, an urokinase plasminogen activator (uPA), an enterokinase, a prostate-specific target (PSA, hK3), an interleukin-1b converting enzyme, a thrombin, a FAP (FAP-a), a dipeptidyl peptidase, or dipeptidyl peptidase IV (DPPIV/CD26), a type II transmembrane serine protease (TTSP), a neutrophil elastase, a proteinase 3, a mast cell chymase, a mast cell tryptase, or a dipeptidyl peptidase.

30. The protease-activated pro-cytokine of any one of the preceding claims, wherein the protease-cleavable polypeptide sequence comprises the sequence of any one of SEQ ID NOs: 700-741, or a variant having one or two mismatches relative to the sequence of any one of SEQ ID NOs: 700-741.

31. The protease-activated pro-cytokine of any one of the preceding claims, wherein the protease-cleavable polypeptide sequence is recognized by a matrix metalloprotease.

32. The protease-activated pro-cytokine of any one of the preceding claims, wherein the protease-cleavable polypeptide sequence is recognized by MMP-1.

33. The protease-activated pro-cytokine of any one of the preceding claims, wherein the protease-cleavable polypeptide sequence is recognized by MMP-2.

34. The protease-activated pro-cytokine of any one of the preceding claims, wherein the protease-cleavable polypeptide sequence is recognized by MMP-3.

35. The protease-activated pro-cytokine of any one of the preceding claims, wherein the protease-cleavable polypeptide sequence is recognized by MMP-7.

36. The protease-activated pro-cytokine of any one of the preceding claims, wherein the protease-cleavable polypeptide sequence is recognized by MMP-8.

37. The protease-activated pro-cytokine of any one of the preceding claims, wherein the protease-cleavable polypeptide sequence is recognized by MMP-9.

38. The protease-activated pro-cytokine of any one of the preceding claims, wherein the protease-cleavable polypeptide sequence is recognized by MMP-12.

39. The protease-activated pro-cytokine of any one of the preceding claims, wherein the protease-cleavable polypeptide sequence is recognized by MMP-13.

40. The protease-activated pro-cytokine of any one of the preceding claims, wherein the protease-cleavable polypeptide sequence is recognized by MMP-14.

41. The protease-activated pro-cytokine of any one of the preceding claims, wherein the protease-cleavable polypeptide sequence is recognized by more than one MMP.

42. The protease-activated pro-cytokine of any one of the preceding claims, wherein the protease-cleavable polypeptide sequence is recognized by two, three, four, five, six, or seven of MMP-2, MMP-7, MMP-8, MMP-9, MMP-12, MMP-13, and MMP-14.

43. The protease-activated pro-cytokine of any one of the preceding claims, wherein the protease-cleavable polypeptide sequence comprises the sequence of any one of SEQ ID NOs: 80-94 or a variant sequence having one or two mismatches relative to the sequence of any one of SEQ ID NOs: 80-90.

44. The protease-activated pro-cytokine of the immediately preceding claim, wherein the protease-cleavable polypeptide sequence comprises the sequence of SEQ ID NO: 80 or a variant sequence having one or two mismatches relative thereto.

45. The protease-activated pro-cytokine of any one of claims 1-43, wherein the protease-cleavable polypeptide sequence comprises the sequence of SEQ ID NO: 81 or a variant sequence having one or two mismatches relative thereto.

46. The protease-activated pro-cytokine of any one of claims 1-43, wherein the protease-cleavable polypeptide sequence comprises the sequence of SEQ ID NO: 82 or a variant sequence having one or two mismatches relative thereto.

47. The protease-activated pro-cytokine of any one of claims 1-43, wherein the protease-cleavable polypeptide sequence comprises the sequence of SEQ ID NO: 83 or a variant sequence having one or two mismatches relative thereto.

48. The protease-activated pro-cytokine of any one of claims 1-43, wherein the protease-cleavable polypeptide sequence comprises the sequence of SEQ ID NO: 84 or a variant sequence having one or two mismatches relative thereto.

49. The protease-activated pro-cytokine of any one of claims 1-43, wherein the protease-cleavable polypeptide sequence comprises the sequence of SEQ ID NO: 85 or a variant sequence having one or two mismatches relative thereto.

50. The protease-activated pro-cytokine of any one of claims 1-43, wherein the protease-cleavable polypeptide sequence comprises the sequence of SEQ ID NO: 86 or a variant sequence having one or two mismatches relative thereto.

51. The protease-activated pro-cytokine of any one of claims 1-43, wherein the protease-cleavable polypeptide sequence comprises the sequence of SEQ ID NO: 87 or a variant sequence having one or two mismatches relative thereto.

52. The protease-activated pro-cytokine of any one of claims 1-43, wherein the protease-cleavable polypeptide sequence comprises the sequence of SEQ ID NO: 88 or a variant sequence having one or two mismatches relative thereto.

53. The protease-activated pro-cytokine of any one of claims 1-43, wherein the protease-cleavable polypeptide sequence comprises the sequence of SEQ ID NO: 89 or a variant sequence having one or two mismatches relative thereto.

54. The protease-activated pro-cytokine of any one of claims 1-43, wherein the protease-cleavable polypeptide sequence comprises the sequence of SEQ ID NO: 90 or a variant sequence having one or two mismatches relative thereto.

55. The protease-activated pro-cytokine of any one of claims 1-43, wherein the protease-cleavable polypeptide sequence comprises the sequence of SEQ ID NO: 80-89 or 90.

56. The protease-activated pro-cytokine of any one of claims 1-43, wherein the protease-cleavable polypeptide sequence comprises the sequence of SEQ ID NO: 91.

57. The protease-activated pro-cytokine of any one of claims 1-43, wherein the protease-cleavable polypeptide sequence comprises the sequence of SEQ ID NO: 92.

58. The protease-activated pro-cytokine of any one of claims 1-43, wherein the protease-cleavable polypeptide sequence comprises the sequence of SEQ ID NO: 93.

59. The protease-activated pro-cytokine of any one of claims 1-43, wherein the protease-cleavable polypeptide sequence comprises the sequence of SEQ ID NO: 94.

60. The protease-activated pro-cytokine of any one of the preceding claims, wherein the targeting sequence comprises the sequence of any one of SEQ ID NOs: 180-662, or a variant having one or two mismatches relative to the sequence of any one of SEQ ID NOs: 180-662.

61. The protease-activated pro-cytokine of the immediately preceding claim, wherein the targeting sequence comprises the sequence of any one of SEQ ID NOs: 180-662.

62. The protease-activated pro-cytokine of any one of the preceding claims, wherein the targeting sequence binds to denatured collagen.

63. The protease-activated pro-cytokine of any one of claims 1-61, wherein the targeting sequence binds to collagen.

64. The protease-activated pro-cytokine of any one of claims 62-63, wherein the collagen is collagen I.

65. The protease-activated pro-cytokine of any one of claims 62-63, wherein the collagen is collagen II.

66. The protease-activated pro-cytokine of any one of claims 62-63, wherein the collagen is collagen III.

67. The protease-activated pro-cytokine of any one of claims 62-63, wherein the collagen is collagen IV.

68. The protease-activated pro-cytokine of any one of claims 1-61, wherein the targeting sequence binds to integrin.

69. The protease-activated pro-cytokine of the immediately preceding claim, wherein the integrin is one or more of α1β1 integrin, α2β1 integrin, α3β1 integrin, α4β1 integrin, α5β1 integrin, α6β1 integrin, α7β1 integrin, α9β1 integrin, α4β7 integrin, αvβ3 integrin, αvβ5 integrin, αIIbβ3 integrin, αIIIbβ3 integrin, αMβ2 integrin, or αIIbβ3 integrin.

70. The protease-activated pro-cytokine of any one of claims 1-61, wherein the targeting sequence binds to von Willebrand factor.

71. The protease-activated pro-cytokine of any one of claims 1-61, wherein the targeting sequence binds to IgB.

72. The protease-activated pro-cytokine of any one of claims 1-61, wherein the targeting sequence binds to heparin.

73. The protease-activated pro-cytokine of the immediately preceding claim, wherein the targeting sequence binds to heparin and a syndecan, a heparan sulfate proteoglycan, or an integrin, optionally wherein the integrin is one or more of α1β1 integrin, α2β1 integrin, α3β1 integrin, α4β1 integrin, α5β1 integrin, α6β1 integrin, α7β1 integrin, α9β1 integrin, α4β7 integrin, αvβ3 integrin, αvβ5 integrin, αIIbβ3 integrin, αIIIbβ3 integrin, αMβ2 integrin, or αIIbβ3 integrin.

74. The protease-activated pro-cytokine of any one of claims 72-73, wherein the syndecan is one of more of syndecan-1, syndecan-4, and syndecan-2(w).

75. The protease-activated pro-cytokine of any one of claims 1-61, wherein the targeting sequence binds to a heparan sulfate proteoglycan.

76. The protease-activated pro-cytokine of any one of claims 1-61, wherein the targeting sequence binds to a sulfated glycoprotein.

77. The protease-activated pro-cytokine of any one of claims 1-61, wherein the targeting sequence binds to hyaluronic acid.

78. The protease-activated pro-cytokine of any one of claims 1-61, wherein the targeting sequence binds to fibronectin.

79. The protease-activated pro-cytokine of any one of claims 1-61, wherein the targeting sequence binds to cadherin.

80. The protease-activated pro-cytokine of any one of the preceding claims, wherein the targeting sequence is configured to bind its target in a pH-sensitive manner.

81. The protease-activated pro-cytokine of the immediately preceding claim, wherein the targeting sequence has a higher affinity for its target at a pH below normal physiological pH than at normal physiological pH, optionally wherein the pH below normal physiological pH is below 7, or below 6.

82. The protease-activated pro-cytokine of the immediately preceding claim, wherein the targeting sequence has a higher affinity for its target at a pH in the range of 5-7, e.g., 5-5.5, 5.5-6, 6-6.5, or 6.5-7, than at normal physiological pH.

83. The protease-activated pro-cytokine of any one of the preceding claims, wherein the targeting sequence comprises one or more histidines, e.g., 1, 2, 3, 4, 5, 6, 7, 8, 9, or 10 histidines.

84. The protease-activated pro-cytokine of any one of the preceding claims, wherein the targeting sequence comprises the sequence of any one of SEQ ID NOs: 641-662, or a variant having one or two mismatches relative to the sequence of any one of SEQ ID NOs: 641-662.

85. The protease-activated pro-cytokine of the immediately preceding claim, wherein the targeting sequence comprises the sequence of any one of SEQ ID NOs: 641-662.

86. The protease-activated pro-cytokine of any one of claims 80-86, wherein the targeting sequence is configured to bind, in a pH-sensitive manner, an extracellular matrix component, IgB (CD79b), an integrin, a cadherin, a heparan sulfate proteoglycan, a syndecan, or a fibronectin.

87. The protease-activated pro-cytokine of the immediately preceding claim, wherein the extracellular matrix component is hyaluronic acid, heparin, heparan sulfate, or a sulfated glycoprotein.

88. The protease-activated pro-cytokine of claim 86, wherein the targeting sequence is configured to bind a fibronectin in a pH-sensitive manner.

89. The protease-activated pro-cytokine of any one of the preceding claims, wherein the cytokine polypeptide sequence is an interleukin polypeptide sequence.

90. The protease-activated pro-cytokine of any one of the preceding claims, wherein the cytokine polypeptide sequence is capable of binding a receptor comprising CD132.

91. The protease-activated pro-cytokine of any one of the preceding claims, wherein the cytokine polypeptide sequence is capable of binding a receptor comprising CD122.

92. The protease-activated pro-cytokine of any one of the preceding claims, wherein the cytokine polypeptide sequence is capable of binding a receptor comprising CD25.

93. The protease-activated pro-cytokine of any one of the preceding claims, wherein the cytokine polypeptide sequence is an IL-2 polypeptide sequence.

94. The protease-activated pro-cytokine of the immediately preceding claim, wherein the IL-2 polypeptide sequence has at least 80, 85, 90, 95, 97, 98, or 99 percent identity to the sequence of any one of SEQ ID NOs: 1-4.

95. The protease-activated pro-cytokine of the immediately preceding claim, wherein the IL-2 polypeptide sequence comprises the sequence of any one of SEQ ID NOs: 1-4.

96. The protease-activated pro-cytokine of any one of claims 93-95, wherein the IL-2 polypeptide sequence is a human TL-2 polypeptide sequence.

97. The protease-activated pro-cytokine of the immediately preceding claim, wherein the IL-2 polypeptide sequence comprises the sequence of SEQ ID NO: 1.

98. The protease-activated pro-cytokine of any one of claims 93-95, wherein the IL-2 polypeptide sequence comprises the sequence of SEQ ID NO: 2.

99. The protease-activated pro-cytokine of any one of claims 93-98, wherein the inhibitory polypeptide sequence comprises an IL-2 binding domain of an IL-2 receptor (IL-2R).

100. The protease-activated pro-cytokine of the immediately preceding claim, wherein the inhibitory polypeptide sequence comprises an amino acid sequence having at least 80, 85, 90, 95, 97, 98, or 99 percent identity to the sequence of any one of SEQ ID NOs: 10-19.

101. The protease-activated pro-cytokine of the immediately preceding claim, wherein the IL-2R is a human IL-2R.

102. The protease-activated pro-cytokine of any one of claims 93-98, wherein the inhibitory polypeptide sequence comprises an IL-2-binding immunoglobulin domain.

103. The protease-activated pro-cytokine of any one of claims 93-98, wherein the IL-2-binding immunoglobulin domain is a human IL-2-binding immunoglobulin domain.

104. The protease-activated pro-cytokine of the immediately preceding claim, wherein the IL-2-binding immunoglobulin domain comprises a VL region comprising hypervariable regions (HVRs) HVR-1, HVR-2, and HVR-3 having the sequences of SEQ ID NOs: 33, 34, and 35, respectively, and a VH region comprising HVR-1, HVR-2, and HVR-3 having the sequences of SEQ ID NOs: 36, 37, and 38, respectively.

105. The protease-activated pro-cytokine of any one of claims 102-104, wherein the IL-2-binding immunoglobulin domain comprises a VL region comprising an amino acid sequence having at least 80, 85, 90, 95, 97, 98, or 99 percent identity to the sequence of SEQ ID NO: 32 and a VH region comprising an amino acid sequence having at least 80, 85, 90, 95, 97, 98, or 99 percent identity to the sequence of SEQ ID NO: 33.

106. The protease-activated pro-cytokine of the immediately preceding claim, wherein the IL-2-binding immunoglobulin domain comprises a VL region comprising the sequence of SEQ ID NO: 32 and a VH region comprising the sequence of SEQ ID NO: 33.

107. The protease-activated pro-cytokine of any one of claims 102-104, wherein the IL-2-binding immunoglobulin domain is an scFv.

108. The protease-activated pro-cytokine of the immediately preceding claim, wherein the IL-2-binding immunoglobulin domain comprises an amino acid sequence having at least 80, 85, 90, 95, 97, 98, or 99 percent identity to the sequence of SEQ ID NO: 30 or 31.

109. The protease-activated pro-cytokine of the immediately preceding claim, wherein the IL-2-binding immunoglobulin domain comprises the sequence of SEQ ID NO: 30 or 31.

110. The protease-activated pro-cytokine of claim 1, comprising the sequence of any one of SEQ ID NOs: 803-852.

111. A pharmaceutical composition comprising the protease-activated pro-cytokine of any one of the preceding claims.

112. The protease-activated pro-cytokine or pharmaceutical composition of any one of the preceding claims, for use in therapy.

113. The protease-activated pro-cytokine or pharmaceutical composition of any one of the preceding claims, for use in treating a cancer.

114. A method of treating a cancer, comprising administering the protease-activated pro-cytokine or pharmaceutical composition of any one of the preceding claims to a subject in need thereof.

115. Use of the protease-activated pro-cytokine or pharmaceutical composition of any one of claims 1-110 for the manufacture of a medicament for treating cancer.

116. The method, use, or protease-activated pro-cytokine for use of any one of claims 113-115, wherein the cancer is a solid tumor.

117. The method, use, or protease-activated pro-cytokine for use of the immediately preceding claim, wherein the solid tumor is metastatic and/or unresectable.

118. The method, use, or protease-activated pro-cytokine for use of any one of claims 113-117, wherein the cancer is a PD-L1-expressing cancer.

119. The method, use, or protease-activated pro-cytokine for use of any one of claims 113-118, wherein the cancer is a melanoma, a colorectal cancer, a breast cancer, a pancreatic cancer, a lung cancer, a prostate cancer, an ovarian cancer, a cervical cancer, a gastric or gastrointestinal cancer, a lymphoma, a colon or colorectal cancer, an endometrial cancer, a thyroid cancer, or a bladder cancer.

120. The method, use, or protease-activated pro-cytokine for use of any one of claims 113-119, wherein the cancer is a microsatellite instability-high cancer.

121. The method, use, or protease-activated pro-cytokine for use of any one of claims 113-120, wherein the cancer is mismatch repair deficient.

122. A nucleic acid encoding the protease-activated pro-cytokine of any one of claims 1-110.

123. An expression vector comprising the nucleic acid of claim 121.

124. A host cell comprising the nucleic acid of claim 121 or the vector of claim 122.

125. A method of producing a protease-activated pro-cytokine, comprising culturing the host cell of claim 124 under conditions wherein the protease-activated pro-cytokine is produced.

126. The method of the immediately preceding claim, further comprising isolating the protease-activated pro-cytokine.

127. A method of boosting T regulatory cells and/or reducing inflammation or autoimmune activity, comprising administering the protease-activated pro-cytokine of any one of claims 1-110 to an area of interest in a subject, e.g., an area of inflammation in the subject.

128. A method of treating an inflammatory or autoimmune disease or disorder in a subject, comprising administering the protease-activated pro-cytokine of any one of claims 1-110 to an area of interest in a subject, e.g., an area of inflammation or autoimmune activity in the subject.
